United States Patent Application Publication US 2026/0265772 A1, published September 10, 2026 (application 19/166,896).

The application's sequence listing, which the Patent Office published only in electronic form, follows.

SEQUENCE LISTING (624 sequences)

SEQ ID NO: 1 - RNA, 274 nt, synthetic construct
  source 1..274: mol_type = other RNA
agacgctacggacttaaataattgagccttaaagaagaaattctttaagtggatgctctcaaactcagggaaacctaaatctagttatagacaaggcaatcctgagccaagccgaagtagtaattagtaaaaacaatagatgacttacaactaatcggaaggtgcagagactcgacgggagctaccctaacgtcaagacgagggtaaagagagagtccaattctcaaagccaataggcagtagcgaaagctgcaagagaatgaaaatccgttga

SEQ ID NO: 2 - RNA, 235 nt, synthetic construct
  source 1..235: mol_type = other RNA
gagcagcggactcatatttcgatgtgccttgcgccgggaaaccacgcaagggatggtgtcaaattcggcgaaacctaagcgcccgcccgggcgtatggcaacgccgagccaagcttcggcgcctgcgccgatgaaggtgtagagactagacggcacccacctaaggcaaacgctatggtgaaggcatagtccagggagtggcgaaagtcacacaaaccggaatccgttggtgctg

SEQ ID NO: 3 - RNA, 279 nt, synthetic construct
  source 1..279: mol_type = other RNA
actactgaaagcataaataattgtgcctttatacagtaatgtatatcgaaaaatcctctaattcagggaacacctaaacaaactaagatgtaggcaatcctgagctaagctcttagtaataagagaaagtgcaacgactattccgataggaagtagggtcaagtgactcgaaatggggattacccttctagggtagtgatatagtctgaacatatatggaaacatatagaaggataggagtaacgaacctattcgtaacataattgaacttttagttat

SEQ ID NO: 4 - RNA, 403 nt, synthetic construct
  source 1..403: mol_type = other RNA
aacaggttgacgacaacaggcctgtgacagcggggcttcgaactttccgtgtttttttttcttccgctagtcgatcatccgtgacggccgggcaagcgcccgagtaccaggaccgtcgggcccccgagaagggggggcctaggatgcggcaagacgacccggttcggggaacgccagcgtgcgctggccgatcccgaggcgaggtgccgtagcgggcacccgtcgtaacgcgcggtagggcgtcggtcccccctcccacggcggaggggaggcttaaggtacgtgctaaacccccagcgatggggcctgtaggaaaagccctggtacggcgaagcctacggggaccgcccgatggcggtcggatgccggcgggccacggagcccccggcgtcgattgctgtta

SEQ ID NO: 5 - RNA, 257 nt, synthetic construct
  source 1..257: mol_type = other RNA
gggctcaacgagtaagattgactaaacgcttaaaagttattcttactatgggcggtacgtaaagaaacttacgtatgtttacctgtcaaactcggggaagccaatagcgcggtaatcccgaaccaagctccagaaatggagaaggtgtagagactggaaggcaggtaccctaacagtaaagctgagggtaaagggacagtccagaccacaaactggttaatccaggcagtgaaaactgtagatggtaagcataaccc

SEQ ID NO: 6 - RNA, 257 nt, synthetic construct
  source 1..257: mol_type = other RNA
caggattcctaaggtaaattgggggttgcgcccggaaacgacgcaatcgatctgctcaaagtcggggaaagcttcgctggtcttccagtatgccaatcccgagccaagctccggagaaatccggtgaaggtgtagagactggatgggcagcacctaaaggccgcaaggtccacggtgaagggacagtccagaccacgaacgcccttatccgattgagatgggcggcggcgaaagccgaagcggtatgaatcctgggg

SEQ ID NO: 7 - RNA, 131 nt, synthetic construct
  source 1..131: mol_type = other RNA
aacaatagatgacttacaactaatcggaaggtgcagagactcgacgggagctaccctaacgtcaagacgagggtaaagagagagtccaattctcaaagccaataggcagtagcgaaagctgcaagagaatg

SEQ ID NO: 8 - RNA, 115 nt, synthetic construct
  source 1..115: mol_type = other RNA
aaataattgagccttaaagaagaaattctttaagtggatgctctcaaactcagggaaacctaaatctagttatagacaaggcaatcctgagccaagccgaagtagtaattagtaa

SEQ ID NO: 9 - RNA, 181 nt, synthetic construct
  source 1..181: mol_type = other RNA
aaccacgcaagggatggtgtcaaattcggcgaaacctaagcgcccgcccgggcgtatggcaacgccgagccaagcttcggcgcctgcgccgatgaaggtgtagagactagacggcacccacctaaggcaaacgctatggtgaaggcatagtccagggagtggcgaaagtcacacaaaccgg

SEQ ID NO: 10 - RNA, 24 nt, synthetic construct
  source 1..24: mol_type = other RNA
atttcgatgtgccttgcgccggga

SEQ ID NO: 11 - RNA, 120 nt, synthetic construct
  source 1..120: mol_type = other RNA
acgccgagccaagcttcggcgcctgcgccgatgaaggtgtagagactagacggcacccacctaaggcaaacgctatggtgaaggcatagtccagggagtggcgaaagtcacacaaaccgg

SEQ ID NO: 12 - RNA, 85 nt, synthetic construct
  source 1..85: mol_type = other RNA
atttcgatgtgccttgcgccgggaaaccacgcaagggatggtgtcaaattcggcgaaacctaagcgcccgcccgggcgtatggca

SEQ ID NO: 13 - RNA, 134 nt, synthetic construct
  source 1..134: mol_type = other RNA
ccgggcgtatggcaacgccgagccaagcttcggcgcctgcgccgatgaaggtgtagagactagacggcacccacctaaggcaaacgctatggtgaaggcatagtccagggagtggcgaaagtcacacaaaccgg

SEQ ID NO: 14 - RNA, 71 nt, synthetic construct
  source 1..71: mol_type = other RNA
atttcgatgtgccttgcgccgggaaaccacgcaagggatggtgtcaaattcggcgaaacctaagcgcccgc

SEQ ID NO: 15 - RNA, 97 nt, synthetic construct
  source 1..97: mol_type = other RNA
tgcgccgatgaaggtgtagagactagacggcacccacctaaggcaaacgctatggtgaaggcatagtccagggagtggcgaaagtcacacaaaccgg

SEQ ID NO: 16 - RNA, 108 nt, synthetic construct
  source 1..108: mol_type = other RNA
atttcgatgtgccttgcgccgggaaaccacgcaagggatggtgtcaaattcggcgaaacctaagcgcccgcccgggcgtatggcaacgccgagccaagcttcggcgcc

SEQ ID NO: 17 - RNA, 51 nt, synthetic construct
  source 1..51: mol_type = other RNA
acgctatggtgaaggcatagtccagggagtggcgaaagtcacacaaaccgg

SEQ ID NO: 18 - RNA, 154 nt, synthetic construct
  source 1..154: mol_type = other RNA
atttcgatgtgccttgcgccgggaaaccacgcaagggatggtgtcaaattcggcgaaacctaagcgcccgcccgggcgtatggcaacgccgagccaagcttcggcgcctgcgccgatgaaggtgtagagactagacggcacccacctaaggcaa

SEQ ID NO: 19 - skipped

SEQ ID NO: 20 - RNA, 198 nt, synthetic construct
  source 1..198: mol_type = other RNA
atttcgatgtgccttgcgccgggaaaccacgcaagggatggtgtcaaattcggcgaaacctaagcgcccgcccgggcgtatggcaacgccgagccaagcttcggcgcctgcgccgatgaaggtgtagagactagacggcacccacctaaggcaaacgctatggtgaaggcatagtccagggagtggcgaaagtcacac

SEQ ID NO: 21 - RNA, 229 nt, synthetic construct
  source 1..229: mol_type = other RNA
aatgtatatcgaaaaatcctctaattcagggaacacctaaacaaactaagatgtaggcaatcctgagctaagctcttagtaataagagaaagtgcaacgactattccgataggaagtagggtcaagtgactcgaaatggggattacccttctagggtagtgatatagtctgaacatatatggaaacatatagaaggataggagtaacgaacctattcgtaacataattg

SEQ ID NO: 22 - RNA, 23 nt, synthetic construct
  source 1..23: mol_type = other RNA
aaataattgtgcctttatacagt

SEQ ID NO: 23 - RNA, 170 nt, synthetic construct
  source 1..170: mol_type = other RNA
atcctgagctaagctcttagtaataagagaaagtgcaacgactattccgataggaagtagggtcaagtgactcgaaatggggattacccttctagggtagtgatatagtctgaacatatatggaaacatatagaaggataggagtaacgaacctattcgtaacataattg

SEQ ID NO: 24 - RNA, 82 nt, synthetic construct
  source 1..82: mol_type = other RNA
aaataattgtgcctttatacagtaatgtatatcgaaaaatcctctaattcagggaacacctaaacaaactaagatgtaggca

SEQ ID NO: 25 - RNA, 182 nt, synthetic construct
  source 1..182: mol_type = other RNA
aagatgtaggcaatcctgagctaagctcttagtaataagagaaagtgcaacgactattccgataggaagtagggtcaagtgactcgaaatggggattacccttctagggtagtgatatagtctgaacatatatggaaacatatagaaggataggagtaacgaacctattcgtaacataattg

SEQ ID NO: 26 - RNA, 70 nt, synthetic construct
  source 1..70: mol_type = other RNA
aaataattgtgcctttatacagtaatgtatatcgaaaaatcctctaattcagggaacacctaaacaaact

SEQ ID NO: 27 - RNA, 149 nt, synthetic construct
  source 1..149: mol_type = other RNA
aataagagaaagtgcaacgactattccgataggaagtagggtcaagtgactcgaaatggggattacccttctagggtagtgatatagtctgaacatatatggaaacatatagaaggataggagtaacgaacctattcgtaacataattg

SEQ ID NO: 28 - RNA, 103 nt, synthetic construct
  source 1..103: mol_type = other RNA
aaataattgtgcctttatacagtaatgtatatcgaaaaatcctctaattcagggaacacctaaacaaactaagatgtaggcaatcctgagctaagctcttagt

SEQ ID NO: 29 - RNA, 120 nt, synthetic construct
  source 1..120: mol_type = other RNA
taggaagtagggtcaagtgactcgaaatggggattacccttctagggtagtgatatagtctgaacatatatggaaacatatagaaggataggagtaacgaacctattcgtaacataattg

SEQ ID NO: 30 - RNA, 132 nt, synthetic construct
  source 1..132: mol_type = other RNA
aaataattgtgcctttatacagtaatgtatatcgaaaaatcctctaattcagggaacacctaaacaaactaagatgtaggcaatcctgagctaagctcttagtaataagagaaagtgcaacgactattccga

SEQ ID NO: 31 - RNA, 79 nt, synthetic construct
  source 1..79: mol_type = other RNA
ctagggtagtgatatagtctgaacatatatggaaacatatagaaggataggagtaacgaacctattcgtaacataattg

SEQ ID NO: 32 - RNA, 173 nt, synthetic construct
  source 1..173: mol_type = other RNA
aaataattgtgcctttatacagtaatgtatatcgaaaaatcctctaattcagggaacacctaaacaaactaagatgtaggcaatcctgagctaagctcttagtaataagagaaagtgcaacgactattccgataggaagtagggtcaagtgactcgaaatggggattaccctt

SEQ ID NO: 33 - RNA, 46 nt, synthetic construct
  source 1..46: mol_type = other RNA
aacatatagaaggataggagtaacgaacctattcgtaacataattg

SEQ ID NO: 34 - RNA, 206 nt, synthetic construct
  source 1..206: mol_type = other RNA
aaataattgtgcctttatacagtaatgtatatcgaaaaatcctctaattcagggaacacctaaacaaactaagatgtaggcaatcctgagctaagctcttagtaataagagaaagtgcaacgactattccgataggaagtagggtcaagtgactcgaaatggggattacccttctagggtagtgatatagtctgaacatatatgga

SEQ ID NO: 35 - RNA, 26 nt, synthetic construct
  source 1..26: mol_type = other RNA
taacgaacctattcgtaacataattg

SEQ ID NO: 36 - RNA, 226 nt, synthetic construct
  source 1..226: mol_type = other RNA
aaataattgtgcctttatacagtaatgtatatcgaaaaatcctctaattcagggaacacctaaacaaactaagatgtaggcaatcctgagctaagctcttagtaataagagaaagtgcaacgactattccgataggaagtagggtcaagtgactcgaaatggggattacccttctagggtagtgatatagtctgaacatatatggaaacatatagaaggataggag

SEQ ID NO: 37 - RNA, 302 nt, synthetic construct
  source 1..302: mol_type = other RNA
gcgcccgagtaccaggaccgtcgggcccccgagaagggggggcctaggatgcggcaagacgacccggttcggggaacgccagcgtgcgctggccgatcccgaggcgaggtgccgtagcgggcacccgtcgtaacgcgcggtagggcgtcggtcccccctcccacggcggaggggaggcttaaggtacgtgctaaacccccagcgatggggcctgtaggaaaagccctggtacggcgaagcctacggggaccgcccgatggcggtcggatgccggcgggccacggagcccccggcgtcgattg

SEQ ID NO: 38 - RNA, 88 nt, synthetic construct
  source 1..88: mol_type = other RNA
tgacgacaacaggcctgtgacagcggggcttcgaactttccgtgtttttttttcttccgctagtcgatcatccgtgacggccgggcaa

SEQ ID NO: 39 - RNA, 217 nt, synthetic construct
  source 1..217: mol_type = other RNA
gcgctggccgatcccgaggcgaggtgccgtagcgggcacccgtcgtaacgcgcggtagggcgtcggtcccccctcccacggcggaggggaggcttaaggtacgtgctaaacccccagcgatggggcctgtaggaaaagccctggtacggcgaagcctacggggaccgcccgatggcggtcggatgccggcgggccacggagcccccggcgtcgattg

SEQ ID NO: 40 - RNA, 173 nt, synthetic construct
  source 1..173: mol_type = other RNA
tgacgacaacaggcctgtgacagcggggcttcgaactttccgtgtttttttttcttccgctagtcgatcatccgtgacggccgggcaagcgcccgagtaccaggaccgtcgggcccccgagaagggggggcctaggatgcggcaagacgacccggttcggggaacgccagcgt

SEQ ID NO: 41 - RNA, 186 nt, synthetic construct
  source 1..186: mol_type = other RNA
gcgggcacccgtcgtaacgcgcggtagggcgtcggtcccccctcccacggcggaggggaggcttaaggtacgtgctaaacccccagcgatggggcctgtaggaaaagccctggtacggcgaagcctacggggaccgcccgatggcggtcggatgccggcgggccacggagcccccggcgtcgattg

SEQ ID NO: 42 - RNA, 204 nt, synthetic construct
  source 1..204: mol_type = other RNA
tgacgacaacaggcctgtgacagcggggcttcgaactttccgtgtttttttttcttccgctagtcgatcatccgtgacggccgggcaagcgcccgagtaccaggaccgtcgggcccccgagaagggggggcctaggatgcggcaagacgacccggttcggggaacgccagcgtgcgctggccgatcccgaggcgaggtgccgta

SEQ ID NO: 43 - RNA, 138 nt, synthetic construct
  source 1..138: mol_type = other RNA
ggcggaggggaggcttaaggtacgtgctaaacccccagcgatggggcctgtaggaaaagccctggtacggcgaagcctacggggaccgcccgatggcggtcggatgccggcgggccacggagcccccggcgtcgattg

SEQ ID NO: 44 - RNA, 252 nt, synthetic construct
  source 1..252: mol_type = other RNA
tgacgacaacaggcctgtgacagcggggcttcgaactttccgtgtttttttttcttccgctagtcgatcatccgtgacggccgggcaagcgcccgagtaccaggaccgtcgggcccccgagaagggggggcctaggatgcggcaagacgacccggttcggggaacgccagcgtgcgctggccgatcccgaggcgaggtgccgtagcgggcacccgtcgtaacgcgcggtagggcgtcggtcccccctcccac

SEQ ID NO: 45 - RNA, 20 nt, synthetic construct
  source 1..20: mol_type = other RNA
ggagcccccggcgtcgattg

SEQ ID NO: 46 - RNA, 370 nt, synthetic construct
  source 1..370: mol_type = other RNA
tgacgacaacaggcctgtgacagcggggcttcgaactttccgtgtttttttttcttccgctagtcgatcatccgtgacggccgggcaagcgcccgagtaccaggaccgtcgggcccccgagaagggggggcctaggatgcggcaagacgacccggttcggggaacgccagcgtgcgctggccgatcccgaggcgaggtgccgtagcgggcacccgtcgtaacgcgcggtagggcgtcggtcccccctcccacggcggaggggaggcttaaggtacgtgctaaacccccagcgatggggcctgtaggaaaagccctggtacggcgaagcctacggggaccgcccgatggcggtcggatgccggcgggccac

SEQ ID NO: 47 - RNA, 115 nt, synthetic construct
  source 1..115: mol_type = other RNA
aatggagaaggtgtagagactggaaggcaggtaccctaacagtaaagctgagggtaaagggacagtccagaccacaaactggttaatccaggcagtgaaaactgtagatggtaag

SEQ ID NO: 48 - RNA, 129 nt, synthetic construct
  source 1..129: mol_type = other RNA
caacgagtaagattgactaaacgcttaaaagttattcttactatgggcggtacgtaaagaaacttacgtatgtttacctgtcaaactcggggaagccaatagcgcggtaatcccgaaccaagctccaga

SEQ ID NO: 49 - RNA, 184 nt, synthetic construct
  source 1..184: mol_type = other RNA
aacttacgtatgtttacctgtcaaactcggggaagccaatagcgcggtaatcccgaaccaagctccagaaatggagaaggtgtagagactggaaggcaggtaccctaacagtaaagctgagggtaaagggacagtccagaccacaaactggttaatccaggcagtgaaaactgtagatggtaag

SEQ ID NO: 50 - RNA, 60 nt, synthetic construct
  source 1..60: mol_type = other RNA
caacgagtaagattgactaaacgcttaaaagttattcttactatgggcggtacgtaaaga

SEQ ID NO: 51 - RNA, 135 nt, synthetic construct
  source 1..135: mol_type = other RNA
atcccgaaccaagctccagaaatggagaaggtgtagagactggaaggcaggtaccctaacagtaaagctgagggtaaagggacagtccagaccacaaactggttaatccaggcagtgaaaactgtagatggtaag

SEQ ID NO: 52 - RNA, 109 nt, synthetic construct
  source 1..109: mol_type = other RNA
caacgagtaagattgactaaacgcttaaaagttattcttactatgggcggtacgtaaagaaacttacgtatgtttacctgtcaaactcggggaagccaatagcgcggta

SEQ ID NO: 53 - RNA, 31 nt, synthetic construct
  source 1..31: mol_type = other RNA
aatccaggcagtgaaaactgtagatggtaag

SEQ ID NO: 54 - RNA, 213 nt, synthetic construct
  source 1..213: mol_type = other RNA
caacgagtaagattgactaaacgcttaaaagttattcttactatgggcggtacgtaaagaaacttacgtatgtttacctgtcaaactcggggaagccaatagcgcggtaatcccgaaccaagctccagaaatggagaaggtgtagagactggaaggcaggtaccctaacagtaaagctgagggtaaagggacagtccagaccacaaactggtt

SEQ ID NO: 55 - RNA, 130 nt, synthetic construct
  source 1..130: mol_type = other RNA
aatccggtgaaggtgtagagactggatgggcagcacctaaaggccgcaaggtccacggtgaagggacagtccagaccacgaacgcccttatccgattgagatgggcggcggcgaaagccgaagcggtatg

SEQ ID NO: 56 - RNA, 107 nt, synthetic construct
  source 1..107: mol_type = other RNA
aaggtaaattgggggttgcgcccggaaacgacgcaatcgatctgctcaaagtcggggaaagcttcgctggtcttccagtatgccaatcccgagccaagctccggaga

SEQ ID NO: 57 - RNA, 12 nt, synthetic construct
  source 1..12: mol_type = other RNA
aaaatccgttga

SEQ ID NO: 58 - RNA, 15 nt, synthetic construct
  source 1..15: mol_type = other RNA
agacgctacggactt

SEQ ID NO: 59 - RNA, 12 nt, synthetic construct
  source 1..12: mol_type = other RNA
aaaaccccccca

SEQ ID NO: 60 - RNA, 15 nt, synthetic construct
  source 1..15: mol_type = other RNA
agacggggggggctt

SEQ ID NO: 61 - RNA, 15 nt, synthetic construct
  source 1..15: mol_type = other RNA
aatccgttggtgctg

SEQ ID NO: 62 - RNA, 15 nt, synthetic construct
  source 1..15: mol_type = other RNA
gagcagcggactcat

SEQ ID NO: 63 - RNA, 13 nt, synthetic construct
  source 1..13: mol_type = other RNA
aacttttagttat

SEQ ID NO: 64 - RNA, 14 nt, synthetic construct
  source 1..14: mol_type = other RNA
actactgaaagcat

SEQ ID NO: 65-68 - skipped (4 entries)

SEQ ID NO: 69 - RNA, 10 nt, synthetic construct
  source 1..10: mol_type = other RNA
aatcctgggg

SEQ ID NO: 70 - RNA, 10 nt, synthetic construct
  source 1..10: mol_type = other RNA
caggattcct

SEQ ID NO: 71 - RNA, 20 nt, synthetic construct
  source 1..20: mol_type = other RNA
ccgtcgattgtccactggtc

SEQ ID NO: 72 - RNA, 20 nt, synthetic construct
  source 1..20: mol_type = other RNA
gaccagtggacaatcgacgg

SEQ ID NO: 73 - RNA, 40 nt, synthetic construct
  source 1..40: mol_type = other RNA
ccgtcgattgtccactggtcccgtcgattgtccactggtc

SEQ ID NO: 74 - RNA, 40 nt, synthetic construct
  source 1..40: mol_type = other RNA
gaccagtggacaatcgacgggaccagtggacaatcgacgg

SEQ ID NO: 75 - RNA, 300 nt, synthetic construct
  source 1..300: mol_type = other RNA
ggacaccccctgacccggtctcagaaagcctgaaagcagaattagtcattagaagggtggttggcttggtcggcatagactttgagcagaaagaggttgaaaatgttgagcctgatttctcttaggcccctctgcagtgtctgttgtggaggccagatacgtaactgcttccgctttttttggtctcattcaaggtgagcaaatccccttcatgtttctcaccagacaatgcagctgatgaggttccagctttgcaaatgtagtcatccatgaggactgtcttcctgagatttcatcagg

SEQ ID NO: 76 - RNA, 300 nt, synthetic construct
  source 1..300: mol_type = other RNA
cctgatgaaatctcaggaagacagtcctcatggatgactacatttgcaaagctggaacctcatcagctgcattgtctggtgagaaacatgaaggggatttgctcaccttgaatgagaccaaaaaaagcggaagcagttacgtatctggcctccacaacagacactgcagaggggcctaagagaaatcaggctcaacattttcaacctctttctgctcaaagtctatgccgaccaagccaaccacccttctaatgactaattctgctttcaggctttctgagaccgggtcagggggtgtcc

SEQ ID NO: 77 - RNA, 100 nt, synthetic construct
  source 1..100: mol_type = other RNA
ggacaccccctgacccggtctcagaaagcctgaaagcagaattagtcattagaagggtggttggcttggtcggcatagactttgagcagaaagaggttga

SEQ ID NO: 78 - RNA, 100 nt, synthetic construct
  source 1..100: mol_type = other RNA
tcaacctctttctgctcaaagtctatgccgaccaagccaaccacccttctaatgactaattctgctttcaggctttctgagaccgggtcagggggtgtcc

SEQ ID NO: 79 - RNA, 285 nt, synthetic construct
  source 1..285: mol_type = other RNA
aaagaagacagtctcgctctatcgcccaggctggagtgtagaatgcagtgctgtgatcttggctcactgcaacctctacctcccaggctcaagcgattcttctgcctcagcctcccgagtagctaggattacaggcgcgcgccaccacacctagcttatttttgtattttcagtagagatggggtttcaccatgttgaccaggctggtctcaaactcctgagcttaagtgacgtgcccgcctcagcctcccaaagtgcttggattataggtgtgagccactgcac

SEQ ID NO: 80 - RNA, 174 nt, synthetic construct
  source 1..174: mol_type = other RNA
catctctactgaaaaatacaaaaaattagccgggcgtagtggcatgagcctgtagtcccagctacttgggaggctgaggcaggagaatggcgtgaactcgggaggcagagcttgcagtgagccgagatcacaccactgcactccagcctgggcgacagagcgagactccgtctc

SEQ ID NO: 81 - RNA, 147 nt, synthetic construct
  source 1..147: mol_type = other RNA
agagagtctcgctcttcgcccaggctggagtgagtggtgtgatctggctcactgcaactctcctcccgtcagcattctctgcctcagcctcccagtagctggatacaggccgccacacccgctatttttgtattttcagtagagatg

SEQ ID NO: 82 - RNA, 147 nt, synthetic construct
  source 1..147: mol_type = other RNA
catctctactgaaaatacaaaaatagcgggtgtggcggcctgtatccagctactgggaggctgaggcagagaatgctgacgggaggagagttgcagtgagccagatcacaccactcactccagcctgggcgaagagcgagactctct

SEQ ID NO: 83 - RNA, 50 nt, synthetic construct
  source 1..50: mol_type = other RNA
ggcccctctgcagtgtctgttgtggaggccagatacgtaactgcttccgc

SEQ ID NO: 84 - RNA, 50 nt, synthetic construct
  source 1..50: mol_type = other RNA
gcggaagcagttacgtatctggcctccacaacagacactgcagaggggcc

SEQ ID NO: 85 - RNA, 50 nt, synthetic construct
  source 1..50: mol_type = other RNA
tagactttgagcagaaagaggttgaaaatgttgagcctgatttctcttag

SEQ ID NO: 86 - RNA, 50 nt, synthetic construct
  source 1..50: mol_type = other RNA
ctaagagaaatcaggctcaacattttcaacctctttctgctcaaagtcta

SEQ ID NO: 87 - RNA, 50 nt, synthetic construct
  source 1..50: mol_type = other RNA
atgaggttccagctttgcaaatgtagtcatccatgaggactgtcttcctg

SEQ ID NO: 88 - RNA, 50 nt, synthetic construct
  source 1..50: mol_type = other RNA
caggaagacagtcctcatggatgactacatttgcaaagctggaacctcat

SEQ ID NO: 89 - RNA, 25 nt, synthetic construct
  source 1..25: mol_type = other RNA
ggacaccccctgacccggtctcaga

SEQ ID NO: 90 - RNA, 25 nt, synthetic construct
  source 1..25: mol_type = other RNA
tctgagaccgggtcagggggtgtcc

SEQ ID NO: 91 - RNA, 25 nt, synthetic construct
  source 1..25: mol_type = other RNA
gaaagcagaattagtcattagaagg

SEQ ID NO: 92 - RNA, 25 nt, synthetic construct
  source 1..25: mol_type = other RNA
ccttctaatgactaattctgctttc

SEQ ID NO: 93 - RNA, 25 nt, synthetic construct
  source 1..25: mol_type = other RNA
cggcatagactttgagcagaaagag

SEQ ID NO: 94 - RNA, 25 nt, synthetic construct
  source 1..25: mol_type = other RNA
ctctttctgctcaaagtctatgccg

SEQ ID NO: 95-116 - skipped (22 entries)

SEQ ID NO: 117 - RNA, 459 nt, synthetic construct
  source 1..459: mol_type = other RNA
atgtatagaatgcagctgctgtcttgcatcgccctgagcctggccctggtcacaaacagcgctcctacaagctctagcaccaagaaaacccagctgcagctcgagcacctgctgctggacctgcagatgatcctgaacggcattaacaactacaagaacccaaagctgaccagaatgctgacatttaagttctacatgcctaagaaggccacagagctgaagcacctgcaatgtctggaagaggaactgaagcccctggaagaggtgcttaatctggctcagagcaagaacttccacctgagacctcgggacctgatcagcgacatcaacgtgatcgtgctggaactgaaaggcagcgagacaaccttcatgtgcgagtacgccgatgagaccgccaccatcgtggagttcctgaatcggtggatcaccttctgccagtccatcatctccaccctgacc

SEQ ID NO: 118 - RNA, 807 nt, synthetic construct
  source 1..807: mol_type = other RNA
atggccagcgagttcaagaagaagctcttctggagggcagtggtggccgagttcctggccacgaccctctttgtcttcatcagcatcggttctgccctgggcttcaaatacccggtggggaacaaccagacggcggtccaggacaacgtgaaggtgtcgctggccttcgggctgagcatcgccacgctggcgcagagtgtgggccacatcagcggcgcccacctcaacccggctgtcacactggggctgctgctcagctgccagatcagcatcttccgtgccctcatgtacatcatcgcccagtgcgtgggggccatcgtcgccaccgccatcctctcaggcatcacctcctccctgactgggaactcgcttggccgcaatgacctggctgatggtgtgaactcgggccagggcctgggcatcgagatcatcgggaccctccagctggtgctatgcgtgctggctactaccgaccggaggcgccgtgaccttggtggctcagccccccttgccatcggcctctctgtagcccttggacacctcctggctattgactacactggctgtgggattaaccctgctcggtcctttggctccgcggtgatcacacacaacttcagcaaccactggattttctgggtggggccattcatcgggggagccctggctgtactcatctacgacttcatcctggccccacgcagcagtgacctcacagaccgcgtgaaggtgtggaccagcggccaggtggaggagtatgacctggatgccgacgacatcaactccagggtggagatgaagcccaaa

SEQ ID NO: 119 - RNA, 337 nt, synthetic construct
  source 1..337: mol_type = other RNA
ggtggaacggcacatgtgtgatggggacattgttatcttcaaccggcagccaactctgcacaaaatgtccatgatggggcatcgggtccgcattctcccatggtctacctttcgcttgaatcttagtgtgacaactccgtacaatgcagactttgacggggatgagatgaacttgcacctgccacagtctctggagacgcgagcagagatccaggagctggccatggttcctcgcatgattgtcaccccccagagcaatcggcctgtcatgggtattgtgcaggacacactcacagcagtgcgcaaattcaccaagagagacgtcttcctggagcgg

SEQ ID NO: 120 - RNA, 508 nt, synthetic construct
  source 1..508: mol_type = other RNA
gtataagagacaggtgtttgccttgtcttcggactggcatcttgggaccaaccccccttttccccagccatgggttaaatggcaataaaggacgtaacaactttgtaaccattaagctttgtaattttgtaaccactaagctttgtgcacataatgtaaccatcaagcttgttagtcccagcaggaggtttgcatgcttgtagccgaaatggggctcgaccccccatagtaggatacttgattttgcattccattgtggacctgcaaactctacacatagaggctttgtcttgcatctaaacacctgagtacagtgtgtacctagaccctatagtacgggaggaccgtttgtttcctcaataaccctacataataggctaggtgggcatgcccaatttgcaagatcccagactgggggtcggtctgggcagggttagatccctgttagctactgcctgatagggtggtgctcaaccatgtgtagtttaaattgagctgttcatatacc

SEQ ID NO: 121 - RNA, 741 nt, synthetic construct
  source 1..741: mol_type = other RNA
ttaaaacagcctgtgggttgatcccacccacaggcccattgggcgctagcactctggtatcacggtacctttgtgcgcctgttttataccccctcccccaactgtaacttagaagtaacacacaccgatcaacagtcagcgtggcacaccagccacgttttgatcaagcacttctgttaccccggactgagtatcaatagactgctcacgcggttgaaggagaaagcgttcgttatccggccaactacttcgaaaaacctagtaacaccgtggaagttgcagagtgtttcgctcagcactaccccagtgtagatcaggtcgatgagtcaccgcattccccacgggcgaccgtggcggtggctgcgttggcggcctgcccatggggaaacccatgggacgctctaatacagacatggtgcgaagagtctattgagctagttggtagtcctccggcccctgaatgcggctaatcctaactgcggagcacacaccctcaagccagagggcagtgtgtcgtaacgggcaactctgcagcggaaccgactactttgggtgtccgtgtttcattttattcctatactggctgcttatggtgacaattgagagatcgttaccatatagctattggattggccatccggtgactaatagagctattatatatccctttgttgggtttataccacttagcttgaaagaggttaaaacattacaattcattgttaagttgaatacagcaaa

SEQ ID NO: 122 - RNA, 730 nt, synthetic construct
  source 1..730: mol_type = other RNA
acatggggggtctgcggacggcttcggcccacccgcgacaagaatgccgtcatctgtcctcattacccgtattccttcccttcccccgcaaccaccacgcttactcgcgcacgtgttgagtggcacgtgcgttgtccaaacagctacacccacacccttcggggcgggtttgtcccgccctcgggttcctcgcggaacccccccctccctctctctctttctatccgccctcacttcccataactacagtgctttggtaggtgagcaccctgaccccccgcggaagctgctaacgtggcaactgtggggatccaggcaggttatcaaaggcacccggtctttccgccttcaggagtatctctgccggtgaattccggtagggctctgcttggtgccaacctcccccaaatgcgcgctgcgggagtgctcttccccaactcatcttagtaacctctcatgtgtgtgcttggtcagcatatctgaggcgacgttccgctgtcccagaccagtccagcaatggacgggccagtgtgcgtagtcgctttccggttttccggcgcatgtttggcgaaacgctgaggtaaggttggtgtgcccaacgcccgtaatttggtgatacctcaagaccacccaggaatgccagggaggtaccccacttcggtgggatctgaccctgggctaattgtctacggtggttcttcttgcttccacttctcttttttctggcatg

SEQ ID NO: 123 - RNA, 675 nt, synthetic construct
  source 1..675: mol_type = other RNA
cccacagcaagaatgccatcatctgtcctcacccccaattttcccttttcttcccctgcaaccattacgcttactcgcatgtgcattgagtggtgcatgtgttgaacaaacagctacactcacatgggggcgggttttcccgccctacggcctctcgcgaggcccaccccttccctccccttataactacagtgctttggtaggtaagcatcctgatcccccgcggaagctgctcacgtggcaactgtggggacccagacaggttatcaaaggcacccggtctttccgccttcaggagtatccctactagtgaattctagcggggctctgcttggtgccaacctcccccaaatgcgcgctgcgggagtgctcttccccaactcaccctagtatcctctcatgtgtgtgcttggtcagcatatctgagacgatgttccgctgtcccagaccagtccagtaatggacgggccagtgcgtgtagtcgtcttccggcttgtccggggcatgtttggtgaaccggtggggtaaggttggtgtgcccaacgcccgtactttggtgacacctcaagaccacccaggaatgccagggaggtaccccacctcacggtgggatctgaccctgggctaattgtctacggtggttcttcttgcttccacttctttcttctgttcacg

SEQ ID NO: 124 - RNA, 744 nt, synthetic construct
  source 1..744: mol_type = other RNA
tttgaaaagggggtgggggggcctcggccccctcaccctcttttccggtggtctggtcccggaccaccgttactccattcagcttcttcggaacctgttcggaggaattaaacgggcacccatactccccccaccccccttttgtaactaagtatgtgtgctcgtgatcttgactcccacggaacggaccgatccgttggtgaacaaacagctaggtccacatcctcccttcccctgggagggcccccgccctcccacatcctccccccagcctgacgtatcacaggctgtgtgaagcccccgcgaaagctgctcacgtggcaattgtgggtccccccttcatcaagacaccaggtctttcctccttaaggctagccccggcgtgtgaattcacgttgggcaactagtggtgtcactgtgcgctcccaatctcggccgcggagtgctgttccccaagccaaacccctggcccttcactatgtgcctggcaagcatatctgagaaggtgttccgctgtggctgccaacctggtgacaggtgccccagtgtgcgtaaccttcttccgtctccggacggtagtgattggttaagatttggtgtaaggttcatgtgccaacgccctgtgcgggatgaaacctctactgccctaggaatgccaggcaggtaccccacctccgggtgggatctgagcctgggctaattgtctacgggtagtttcatttccaatccttttatgtcggagtc

SEQ ID NO: 125 - RNA, 742 nt, synthetic construct
  source 1..742: mol_type = other RNA
ttaaaacagcctgtgggttgcacccacccacagggcccactgggcgctagcactctggtatcacgatacctttgtgcgcctgttttatatccccaccccgagtaaacgttagaagttacgcaaccccgatcaatagtaggtgtagcactccagctgcatcgagatcaagcacttctgtctccccggaccgagtatcaatagactgctaacgcggttgaaggagaaaacgttcgttacccggccaattacttcgagaagcccagtagtgccgtgaaagttgcggagtgtttcgctcagcacttcccccgtgtagatcaggctgatgagtcaccgcgatccccacaggtgactgtggcggtggctgcgttggcggcctgcctatggggcaacccataggacgctctaatacagacatggtgcgaagagcctattgagctaattggtagtcctccggcccctgaatgcggctaatcctaactgcggagcacatgccctcaaaccagggggtggtgtgtcgtaacgggtaactctgcagcggaaccgactactttgggtgtccgtgtttctttttattcttataatggctgcttatggtgacaattaaagaattgttaccatatagctattggattggccatccggtgactaacaaatcgctcatataccagtttgttggttttgttcccttatcacatacagctcataacaccctcttatatttactacaattgaatagcaagaa

SEQ ID NO: 126 - RNA, 709 nt, synthetic construct
  source 1..709: mol_type = other RNA
tatggcaggcgggcttgtggacggcttcggcccacccacagcaagaatgccatcatctgtcctcacccccaattttcccttttcttcccctgcaaccattacgcttactcgcatgtgcattgagtggtgcatgtgttgaacaaacagctacactcacatgggggcgggttttcccgccctacggcctctcgcgaggcccaccccttccctccccttataactacagtgctttggtaggtaagcatcctgatcccccgcggaagctgctcacgtggcaactgtggggacccagacaggttatcaaaggcacccggtctttccgccttcaggagtatccctactagtgaattctagcggggctctgcttggtgccaacctcccccaaatgcgcgctgcgggagtgctcttccccaactcaccctagtatcctctcatgtgtgtgcttggtcagcatatctgagacgatgttccgctgtcccagaccagtccagtaatggacgggccagtgcgtgtagtcgtcttccggcttgtccggggcatgtttggtgaaccggtggggtaaggttggtgtgcccaacgcccgtactttggtgacacctcaagaccacccaggaatgccagggaggtaccccacctcacggtgggatctgaccctgggctaattgtctacggtggttcttcttgcttccacttctttcttctgttcacg

SEQ ID NO: 127 - RNA, 416 nt, synthetic construct
  source 1..416: mol_type = other RNA
cttccttttaattcgtaactgataagtgatagtccttggaagctaggtatttgttacgctagttttggattatcttgtgcccaacatttgttttcgaacatatgttgtgtttaaacacagaaatctagtttctttggttatgagtttaatggaatatccttttgaaagacttgccttggcgcgggctagagcgcaattgtcaccaggtattgcaccaatggtggcgacagggtacagaagagcaagtactcctgactgggtaatgggactgcattgcatatccctaggcatctattgagatttctctggagcccaccagcatggagttcctgtatgggaatgcaggactggacttgtgctgcctgacagggtcgcggctggccgtctgtactttgtatagtcagttgaaactcatt

SEQ ID NO: 128 - RNA, 537 nt, synthetic construct
  source 1..537: mol_type = other RNA
ttttgcggctctgccgccgttcgggttttacctgttttcacagagcaaaacaggacctctagtttcgtgcttaaacgagatcatgctcgaactagaactataacgctggtcactggacccgtgccgcgccttgcggatctttgcgggaatggtggctagtgggctgtggaagtgactctaaccacacgcccctcaagtgtgggaaaacacgaactggtgtagcgacgacgataggccttgggacaccctctccagtgatggagacccaaggggccaaaagccacgccttgtgccctgtcgttcacaaccccagtgcagttcgtgccagtacctgcttttgggaagtgtgctttggacagctgaaaacagtcctagtgggagactaaggatgcccaggaggtacccggaggtaacaagtgacactctggatctgacttggggagagcgggtctgctttacagacgccactctttaaaaaacttctatgtctcgtcaggcaccggaggccgggccttttcctttaaaacaatacacttt

SEQ ID NO: 129 - RNA, 742 nt, synthetic construct
  source 1..742: mol_type = other RNA
ttaaaacagctctggggttgtacccaccccagaggcccacgtggcggctagtactccggtattgcggtacccttgtacgcctgttttatactcccttcccgtaacttagacgcacaaaaccaagttcaatagaagggggtacaaaccagtaccaccacgaacaagcacttctgtttccccggtgatgtcgtatagactgcttgcgtggttgaaagcgacggatccgttatccgcttatgtacttcgagaagcccagtaccacctcggaatcttcgatgcgttgcgctcagcactcaaccccagagtgtagcttaggctgatgagtctggacatccctcaccggtgacggtggtccaggctgcgttggcggcctacctatggctaacgccatgggacgctagttgtgaacaaggtgtgaagagcctattgagctacataagaatcctccggcccctgaatgcggctaatcccaacctcggagcaggtggtcacaaaccagtgattggcctgtcgtaacgcgcaagtccgtggcggaaccgactactttgggtgtccgtgtttccttttattttattgtggctgcttatggtgacaatcacagattgttatcataaagcgaattggattggccatccggtgaaagtgagactcattatctatctgtttgctggatccgctccattgagtgtgtttactctaagtacaatttcaacagttatttcaatcagacaattgtatcata

SEQ ID NO: 130 - RNA, 627 nt, synthetic construct
  source 1..627: mol_type = other RNA
ttaaaacagcggatgggtatcccaccatccgacccacagggtgtagtgctctggtattttgtacctttgcacgcctgtttccccattgtacccctccttaaatttcctccccaagtaacgttagaagtttaaggaaacaaatgtacaataggaagcatcacatccagtggtgttatgtacaagcacttctgtttccccggagcgaggtataagtggtacccaccgccgaaagcctttaaccgttatccgccaatcaactacgtaatggctagtattaccatgtttgtgacttggtgttcgatcaggtggttccccccactagtttggtcgatgaggctaggaactccccacgggtgaccgtgtcctagcctgcgtggcggccaacccagcttttgctgggacgcctttttacagacatggtgtgaagacctgcatgtgcttgattgtgagtcctccggcccctgaatgcggctaaccttaaccccggagccttgcaacataatccaatgttgttgaggtcgtaatgagtaattctgggatgggaccgactactttgggtgtccgtgtttccttttattctttatattgtcttatggtcacagcatatatagcatatatactgtgatc

SEQ ID NO: 131 - RNA, 627 nt, synthetic construct
  source 1..627: mol_type = other RNA
ttaaaacagcggatgggtatcccaccatccggcccactgggtgtagtactctggtacattgtacctttgtacgcctgttttccccctcttgtacccgcccttcaagctccttgcccaagtaacgttagaagtttgaacattggtacaataggaagcatcacatccagtggtgtactgtacaaacacttctgttgccccggagcgaggtatagatggtccccaccgtcaaaagcctttaaccgttatccgccaatcaactacgtaatggctagtagcaccttggatttaagttggcgttcgatcaggtggtaacccccactagtttggtcgatgaggctaggaattccccacgggtgaccgtgtcctagcctgcgtggcggccaacccagcatccgctgggacgccaatttaatgacatggtgtgaagacctgcatgtgcttgattgtgagtcctccggcccctgaatgcggctaaccctaaccccggagccttgcagcacaatccagtgttgttaaggtcgtaatgagcaattctgggatgggaccgactactttgggtgtccgtgtttcttatttttcttgaatttttcttatggtcacagcatatatacattatatactgtgatc

SEQ ID NO: 132 - RNA, 743 nt, synthetic construct
  source 1..743: mol_type = other RNA
ttaaaacagcctgtgggttgttcccacccgcagggcccactgggcgctagcacactggtatcccggtacccttgtgcgcctgttttatataccctcccccttatgtaacttagaagtatgattcaaacggtcgacaggcggctcagtgcaccaactgagtcatgaccaagcacttctgttaccccggactgagtatcaataagctgttcacacggctgaaggagaaaacgttcgttacccggccaattacttcgagaaacctagtaccaccatgaaggttgcgcagtgtttcgctccacacaaccccagtgtagatcaggtcgatgagtcaccgcattccccacgggcgaccgtggcggtggctgcgttggcggcctgcccatggggcaacccatgggacgcttcaatactgacatggtgtgaagagtctattgagctaattggtagtcctccggcccctgaatgcggctaatcccaactgtggagcagatactcacaaaccagtgagcggtctgtcgtaacgggcaactccgcagcggaaccgactactttgggtgtccgtgtttctttttattcttacattggctgcttatggtgacaattgacaaattgttaccatatagctattggattggccatccggtgacaaacagagctattgtttacttgtttgttggtttcataccattaaattacaaggtcttagaaactctcaactttattttgacactcaatacagcaaa

SEQ ID NO: 133 - RNA, 724 nt, synthetic construct
  source 1..724: mol_type = other RNA
ttgaaagccgggggtgggagatccggattgccagtctgctcgatatcgcaggctgggtccgtgactacccactccccctttcaacgtgaaggctacgatagtgccagggcgggtactgccgtaagtgccaccccaaaacaacaacaaccccccctctccctcccccccccctaacgttactggccgaagccgcttggaataaggccggtgtgcgtttgtctatatgttattttccaccatattgccgtcttttggcaatgtgagggcccggaaacctggccctgtcttcttgacgagcattcctaggggtctttcccctctcgccaaaggaatgcaaggtctgttgaatgtcgtgaaggaagcagttcctctggaagcttcttgaagacaaacaacgtctgtagcgaccctttgcaggcagcggaaccccccacctggcgacaggtgcctctgcggccaaaagccacgtgtataagatacacctgcaaaggcggcacaaccccagtgccacgttgtgagttggatagttgtggaaagagtcaaatggctctcctcaagcgtattcaacaaggggctgaaggatgcccagaaggtaccccattgtatgggatctgatctggggcctcggtgcacatgctttacatgtgtttagtcgaggttaaaaaacgtctaggccccccgaaccacggggacgtggttttcctttgaaaaacacgatgataat

SEQ ID NO: 134 - RNA, 696 nt, synthetic construct
  source 1..696: mol_type = other RNA
ttgccagtctgctcgatatcgcaggctgggtccgtgactacccactccccctttcaacgtgaaggctacgatagtgccagggcgggtactgccgtaagtgccaccccaaacaacaacaacaaaacaaactccccctccccccccttactatactggccgaagccacttggaataaggccggtgtgcgtttgtctacatgctattttctaccgcattaccgtcttatggtaatgtgagggtccagaacctgaccctgtcttcttgacgaacactcctaggggtctttcccctctcgacaaaggagtgtaaggtctgttgaatgtcgtgaaggaagcagttcctctggaagcttcttaaagacaaacaacgtctgtagcgaccctttgcaggcagcggaaccccccacctggtgacaggtgcctctgcggccaaaagccacgtgtataagatacacctgcaaaggcggcacaaccccagtgccacgttgtgagttggatagttgtggaaagagtcaaatggctctcctcaagcgtattcaacaaggggctgaaggatgcccagaaggtaccccattgtatgggatctgatctggggcctcggtgcacgtgctttacacgtgttgagtcgaggtgaaaaaacgtctaggccccccgaaccacggggacgtggttttcctttgaaaaccacgattacaat

SEQ ID NO: 135 - RNA, 710 nt, synthetic construct
  source 1..710: mol_type = other RNA
ttgaaagccgggggtgggagatccggattgccagtctgctcgatatcgcaggctgggtccgtgactacccactccccctttcaacgtgaaggctacgatagtgccagggcgggtactgccgtaagtgccaccccaaaataacaacagaccccccccctaacgttactggccgaagccgcttggaataaggccggtgtgcgtttgtctatatgttattttccaccatattgccgtcttttggcaatgtgagggcccggaaacctggccctgtcttcttgacgagcattcctaggggtctttcccctctcgccaaaggaatgcaaggtctgttgaatgtcgtgaaggaagcagttcctctggaagcttcttgaagacaaacaacgtctgtagcgaccctttgcaggcagcggaaccccccacctggcgacaggtgcctctgcggccaaaagccacgtgtataagatacacctgcaaaggcggcacaaccccagtgccacgttgtgagttggatagttgtggaaagagtcaaatggctctcctcaagcgtattcaacaaggggctgaaggatgcccagaaggtaccccattgtatgggatctgatctggggcctcggtgcacatgctttacatgtgtttagtcgaggttaaaaaacgtctaggccccccgaaccacggggacgtggttttcctttgaaaaacacgatgataat

SEQ ID NO: 136 - RNA, 610 nt, synthetic construct
  source 1..610: mol_type = other RNA
ttaaaactgggtacaggttgttcccacctgtatcacccacgtggtgtggtgctcttgtattccggtacacttgcacgccagtttgccacccctcacccgtcgtaacttagaagctaacaactcgaccaacaggcggtggtaaaccataccacttacggtcaagcactcctgtttccccggtatgcgaggaatagactcctacagggttgaagcctcaagtatcgttatccgcattggtactacgcaaagcttagtagtgccttgaaagtcccttggttggtcgctccgctagtttcccctagtagacctggcagatgaggcaggacactccccactggcgacagtggtcctgcctgcgtggctgcctgcgcacccttaggggtgcgaagccaagtgacagacaaggtgtgaagagccccgtgtgctaccaatgagtcctccggcccctgaatgcggctaatccaaccccacagctattgcacacaagccagtgtgtatgtagtcgtaatgagcaattgtgggacggaaccgactactttgggtgtccgtgtttccttttattcttatcattctgcttatggtgacaatactgtgaaatagtgttgttacc

SEQ ID NO: 137 - RNA, 614 nt, synthetic construct
  source 1..614: mol_type = other RNA
taaaactggatccaggttgttcccacctggatctcctattgggagttgtactctattattccggtaattttgtacgccagttttatcttccccctccccaattgtaacttagaaggttatcaatacgaccaataggtggtagttagccaaactaccaaaggtcaagcacttctgtttccccggtcaaagttgatatgctccaacagggcaaaaacaactgagatcgttatccgcaaagtgcctacgcaaagcctagtaacacctttgaagatttatggttggtcgttccgctatttcccatagtagacctggcagatgaggctagaaatcccccactggcgacagtgctctagcctgcgtggctgcctgcgcaccccttgggtgcgaagccatacattggacaaggtgtgaagagccccgtgtgctcactttgagtcctccggcccctgaatgtggctaaccttaaccctgcagctagtgcatgtaatccaacatgttgctagtcgtaatgagtaattgcgggacgggaccaactactttgggtgtccgtgtttcactttttccttttaatattgcttatggtgacaatatatatagctatatatattgacacc

SEQ ID NO: 138 - RNA, 624 nt, synthetic construct
  source 1..624: mol_type = other RNA
ttcccctgcaaccattacgcttactcgcatgtgcattgagtggtgcatgtgttgaacaaacagctacactcacatgggggcgggttttcccgccctacggcttctcgcgaggcccacccctcccctttctcccataactacagtgctttggtaggtaagcatcctgatcccccgcggaagctgctcacgtggcaactgtggggacccagacaggttatcaaaggcacccggtctttccgccttcaggagtatccctgctagcgaattctagtagggctctgcttggtgccaacctcccccaaatgcgcgctgcgggagtgctcttccccaactcaccctagtatcctctcatgtgtgtgcttggtcagcatatctgagacgatgttccgctgtcccagaccagtccagtaatggacgggccagtgtgcgtagtcgtcttccggcttgtccggcgcatgtttggtgaaccggtggggtaaggttggtgtgcccaacgcccgtactcaggggatacctcaaggcacccaggaatgccagggaggtaccccgcttcacagcgggatctgaccctggggtaaatgtctgcggggggtcttcttggcccacttctcagtacttttcagg

SEQ ID NO: 139 - RNA, 744 nt, synthetic construct
  source 1..744: mol_type = other RNA
ttaaaacagcctgtgggttgttcccatccacagggcccactgggcgccagcactctggtattgcggtaccttagtgcgcctgttttatatacccgtcccccaaacgtaacttagacgcatgtcaacgaagaccaatagtaagcgcagcacaccagctgtgttccggtcaagcacttctgttaccccggaccgagtatcaataagctactcacgtggctgaaggagaaaacgttcgttacccgaccaattacttcaagaaacctagtaacaccatgaaggttgcgcagtgtttcgctccgcacaaccccagtgtagatcaggtcgatgagtcaccgcattccccacgggtgaccgtggcggtggctgcgctggcggcctgcccatggggaaacccatgggacgcttcaatactgacatggtgcgaagagtctattgagctaattggtagtcctccggcccctgaatgcggctaatcctaactgcggagcagatacccacacaccagtgggcagtctgtcgtaacgggcaactctgcagcggaaccgactactttgggtgtccgtgtttctctttatccttatactggctgcttatggtgacaattgagagattgttaccatatagctattggattggccatccggtgacaaatagagcaattgtgtatttgtttgttggtttcgtgccattaaattacaaggttctaaacacccttaatcttattatagcattcaacacaacaaa

SEQ ID NO: 140 - RNA, 743 nt, synthetic construct
  source 1..743: mol_type = other RNA
gctcttccgatctgggttgttcccacccacagggcccactgggcgccagcactctgattccacggaatctttgtgcgcctgttttacaacccttcccaatttgtaacgtagaagcaatacacactactgatcaatagtaggcatggcgcgccagtcatgtcatgatcaagcacttctgttcccccggactgagtatcaatagactgctcacgcggttgaaggagaaaacgttcgttacccggctaactacttcgagaaacctagtagcaccatggaagctgcggagtgtttcgctcagcactttccccgtgtagatcaggtcgatgagtcactgcaatccccacgggcgaccgtggcagtggctgcgttggcggcctgcctatggggcaacccataggacgctctaatgtggacatggtgcgaagagtctattgagctagttagtagtcctccggcccctgaatgcggctaatcctaactgcggagcacatgccttcaacccaggaggtggtgtgtcgtaacgggtaactctgcagcggaaccgactactttgggtgtccgtgtttccttttatccttatattggctgcttatggtgacaatcacggaattgttgccatatagctattggattggccatccggtgtctaacagagctattgtatacctatttgttggatttactcccctatcatacaaatctctgaacactttgtgctttatactgaacttaaacacacgaaa

SEQ ID NO: 141 - RNA, 746 nt, synthetic construct
  source 1..746: mol_type = other RNA
ttaaaacagctctggggttgttcccaccccagaggcccacgtggcggccagtacaccggtaccacggtacccttgtacgcctgttttatactcccctccccgtaaactagaagcacgaaacacaagttcaatagaagggggtacagaccagtaccaccacgaacaagcacttctgttcccccggtgaggtcacatagactgtccccacggtcaaaagtgactgatccgttatccgctcacgtacttcggaaagcctagtaccaccttggaatctacgatgcgttgcgctcagcactcgaccccggagtgtagcttaggctgatgagtctggacgttccccactggtgacagtggtccaggctgcgttggcggcctacctgtggtccaaaaccacaggacgctagtagtgaacaaggtgtgaagagcccactgagctacctgagaatcctccggcccctgaatgcggctaatcccaaccacggagcaggtaatcgcaaaccagcggtcagcctgtcgtaacgcgtaagtctgtggcggaaccgactactttgggtgtccgtgtttccttttatttttatggtggctgcttatggtgacaatcatagattgttatcataaagcaaattggattggccatccggagtgagctaaactatctatttctctgagtgttggattcgtttcacccacattctgaacaatcagcctcattagtgttaccctgttaataagacgatatcatcacg

SEQ ID NO: 142 - RNA, 737 nt, synthetic construct
  source 1..737: mol_type = other RNA
ttaaaatagcctcagggttgttcccaccctgagggcccacgtggtgtagtactctggtattacggtacctttgtacgcctattttatacccccttccccaagtaatttagaagcaagcacaaaccagttcagtagtaagcagtacaatccagtactgtaatgaacaagtacttctgttaccccggaagggtctatcggtaagctgtacccacggctgaagaatgacctaccgttaaccggctacctacttcgagaagcctagtaatgccgttgaagttttattgacgttacgctcagcacactaccccgtgtgtagttttggctgatgagtcacggcactccccacgggcgaccgtggccgtggctgcgttggcggccaaccaaggagtgcaagctccttggacgtcatattacagacatggtgtgaagagcctattgagctaggtggtagtcctccggcccctgaatgcggctaatcctaactccggagcatatcggtgcgaaccagcacttggtgtgttgtaatacgtaagtctggagcggaaccgactactttgggtgtccgtgtttcctgttttaacttttatggctgcttatggtgacaatttaacattgttaccatatagctgttgggttggccatccggattttgttataaaaccatttcctcgtgccttgacctttaacacatttgtgaacttctttaaatcccttttattagtccttaaatactaaga

SEQ ID NO: 143 - RNA, 430 nt, synthetic construct
  source 1..430: mol_type = other RNA
cccctccacccttaaggtggttgtatcccacataccccaccctcccttccaaagtggacggacaactggattttgactaacggcaagtctgaatggtatgatttggatacgtttaaacggcagtagcgtggcgagctatggaaaaatcgcaattgtcgatagccatgttagtgacgcgcttcggcgtgctcctttggtgattcggcgactggttacaggagagtaggcagtgagctatgggcaaacctctacagtattacttagagggaatgtgcaattgagacttgacgagcgtctctttgagatgtggcgcatgctcttggcattaccatagtgagcttccaggttgggaaacctggactgggcctatactacctgatagggtcgcggctggccgcctgtaactagtatagtcagttgaaaccccccc

SEQ ID NO: 144 - RNA, 752 nt, synthetic construct
  source 1..752: mol_type = other RNA
tttcctcctttcgaccgccttacggcaggcgggtccgcggacggcttcggcctacccgcgacaagaatgccgtcatctgtccttatcacccatattctttcccttcccccgcaaccatcacgcttactcgcgcacgtgttgagtggcacgtgcgttgtccaaacagttacactcacacccttggggcgggtttgtcccgccctcgggttcctcgcggaaccctccctcttctctctccctttctatccgccttcactttccataactacagtgctttggtaggtaagcatcctgaccccccgcggaagctgccaacgtggcaactgtggggatccaggcaggttatcaaaggcacccggtctttccgccttcaggagtatccctgccggtgaattccgacagggctctgcttggtgccaacctcccccaaatgcgcgctgcgggagtgctcttccccaactcatcttagtaacctctcatgtgtgtgcttggtcagcatatctgaggcgacgttccgctgtcccagaccagtccagcaatggacgggccagtgtgcgtagtcgctttccggtttcccggcgcatgtttggcgaaacgctgaggtaaggttggtgtgcccaatgcccgtaatttggtgacacctcaagaccacccaggaatgccagggaggtaccccacttcggtgggatctgaccctgggctaattgtctacggtggttcttcttgcttccacttctcttttttctggcatg

SEQ ID NO: 145 - RNA, 708 nt, synthetic construct
  source 1..708: mol_type = other RNA
tatggcaggcgggcttgtggacggcttcggcccacccacagcaagaatgccatcatctgtcctcacccccatgtttcccctttctttccctgcaaccgttacgcttactcgcaggtgcatttgagtggtgcacgtgttgaataaacagctacactcacatgggggcgggttttcccgccctgcggcctctcgcgaggcccacccctccccttcctcccataactacagtgctttggtaggtaagcatcctgatcccccgcggaagctgctcacgtggcaactgtggggacccagacaggttatcaaaggcacccggtctttccgccttcaggagtatccctgctagtgaattctagtagggctctgcttggtgccaacctcccccaaatgcgcgctgcgggagtgctcttccccaactcaccctagtatcctctcatgtgtgtgcttggtcagcatatctgagacgatgttccgctgtcccagaccagtccagtaatggacgggccagtgtgcgtagtcgtcttccggcttttccggcgcatgtttggtgaaccggtggggtaaggttggtgtgcccaacgcccgtactttggtgatacctcaagaccacccaggaatgccagggaggtaccccgcttcacagcgggatctgaccctgggctaattgtctacggtggttcttcttgcttccacttctttctactgttc

SEQ ID NO: 146 - RNA, 699 nt, synthetic construct
  source 1..699: mol_type = other RNA
tatggcaggcgggcttgtggacggtttcggcccacccacagcaagaatgccatcatctgtcctcacccccaattttccctttcttcccctgcaatcatcacgcttactcgcatgtgcattgagtggtgcatgtgttgaacaaacagctacactcacatgggggcgggttttcccgccctacggcctctcgcgaggcccacccttcccctccccttataactacagtgctttggcaggtaagcatcctgatcccccgcggaagctgctcacgtggcaactgtggggacccagacaggttatcaaaggcacccggtctttccgccttcaggagcatccccactagtgaattctagtggggctctgcttggtgccaacctcccccaaatgcgcgctgcgggagtgctcttccccaacccatcctagtatcctctcatgtgtgtgcttggtcagcatatctgagacgacgttccgctgtcccagaccagtccagtaatggacgggccagtgtgcgtagtcgtcttccggcttgtccggcgcatgtttggtgaaccggtggggtaaggttggtgtgcccaacgcccgtactttggtgacacctcaagaccacccaggaatgccagggaggtaccccgcctcacggcgggatctgaccctgggctaattgtctacggtggttcttcttgcttccacttctttctt

SEQ ID NO: 147 - RNA, 624 nt, synthetic construct
  source 1..624: mol_type = other RNA
ttctcctgcaaccattacgcttaatcgcatgtgcattgagtggtgcatgtgttgaacaaacagctacaatcacatgggggcgggttttcccgccccacggcttctcgcgaggcccatccctcccttttctcccataactacagtgctttggtaggtaagcatcccgatctcccgcggaagctgctcacgtggcaactgtggggacccagacaggttatcaaaggcacccggtctttccgccttcaggagtatccctgctagcgaattctagtagggctctgcttggtgccaacctctcccaaatgcgcgctgcgggagtgctcttccccaaatcaccccagtatcctctcatgtgtgtgcctggtcagcatatctgagacgatgttccgctgtcccagaccagtccagtaatggacgggccagtgtgcgtagtcgtcctccggcttgtccggcgcatgtttggtgaaccggtggggtaaggttggtgtgcccaacgcccgtaatcaggggatacctcaaggcacccaggaatgccagggaggtatcccgcctcacagcgggatctgaccctggggtaaatgtctgcggggggtcctcttggcccaattctcagtaattttcagg

SEQ ID NO: 148 - RNA, 650 nt, synthetic construct
  source 1..650: mol_type = other RNA
tctgtcctcaccccatcttcccttctttcctgcaccgttacgcttactcgcatgtgcattgagtggtgcacgtgcttgaacaaacagctacactcacatgggggcgggttttcccgccctgcggcctctcgcgaggcccacccctccccttcctcccataactacagtgctttggtaggtaagcatcctgatcccccgcggaagctgctcacgtggcaactgtggggacccagacaggttatcaaaggcacccggtctttccgccttcaggagtatccctgctagtgaattctagtagggctctgcttggtgccaacctcccccaaatgcgcgctgcgggagtgctcttccccaactcaccctagtatcctctcatgtgtgtgcttggtcagcatatctgagacgatgttccgctgtcccagaccagtccagtaatggacgggccagtgtgcgtagtcgtcttccggcttgtccggcgcatgtttggtgaaccggtggggtaaggttggtgtgcccaacgcccgtactttggtgatacctcaagaccacccaggaatgccagggaggtaccccgcttcacagcgggatctgaccctgggctaattgtctacggtggttcttcttgcttccacttctttctactgttcatg

SEQ ID NO: 149 - RNA, 742 nt, synthetic construct
  source 1..742: mol_type = other RNA
ttaaaacagcctgtgggttgttcccacccacagggcccattgggcgtcagcaccctggtatcacggtacctttgtgcgcctgttttatatcccttcccccaattgtaacttagaagaaacacacaccgatcaacagcaagcgtggcacaccagccatgttttggtcaagcacttctgttaccccggactgagtatcaatagactgctcacgcggttgaaggagaaagcgtccgttatccggccagctacttcgagaaacctagtaacaccatggaagttgcggagtgtttcgctcagcactaccccagtgtagatcaggtcgatgagtcaccgctttccccacgggcgaccgtggcggtggctgcgttggcggcctgcctatgggggaacccataggacgctctaatacagacatggtgcgaagagtctattgagctagctggtattcctccggcccctgaatgcggctaatcctaactgtggagcacatgcccctaatccaaggggtagtgtgtcgtaatgagcaattccgcagcggaaccgactactttgggtgtccgtgtttcctcttattcttgtactggctgcttatggtgacaattgagagattgttaccatatagctattggattggccatccggtgactaatagagctattgtgtatctctttgttggatttgtaccacttaatttgaaagaaatcaggacactacgctacattttactattgaacaccgcaaa

SEQ ID NO: 150 - RNA, 743 nt, synthetic construct
  source 1..743: mol_type = other RNA
ttaaaacagcctgtgggttgcacccactcacagggcccactgggcgcaagcactctggcacttcggtacctttgtgcgcctgttttatatcccctcccccaatgaaatttagaagcagcaaaccccgatcaatagcaggcataacgctccagttatgtcttgatcaagcacttctgtttccccggactgagtatcaatagactgctcacgcggttgaaggagaaaacgttcgttatccggctaactacttcggaaagcctagtaacaccatggaagttgcggagagtttcgttcagcacttccccagtgtagatcaggtcgatgagtcaccgcattccccacgggcgaccgtggcggtggctgcgttggcggcctgcccatggggtaacccatgggacgctctaatacggacatggtgtgaagagtctactgagctagttagtagtcctccggcccctgaatgcggctaatcccaactgcggagcacacgcccacaagccagtgggtagtgtgtcgtaacgggcaactctgcagcggaaccgactactttgggtgtccgtgtttccttttattcttatgttggctgcttatggtgacaattaaagagttgttaccatatagctattggattggccatccggtgtgcaacagagcgatcgtttacctatttattggttttgtaccattgacactgaagtctgtgatcacccttaattttatcttaaccctcaacacagccaaac

SEQ ID NO: 151 - RNA, 636 nt, synthetic construct
  source 1..636: mol_type = other RNA
cctcggtccctctttccgtcgccgcccacgacgttaaatgcggtgttgtggtgcttaggtgccacaccactgctatttgggtccccctttcccctatatatgtttgtttgtttatttcaatttcttgaggattggcacctccttatgccaaatctaaatcgtggaggatcccaggctttctggtctttaacagaactccacgtccaggtcatagaaactggttggtaggctgcctgagtagtccatttgctagtagtcccttgtgaacagggtggctcccgtttactgctggtattcccggtgtaggtcgccatggtggtaacaccatcctgcattgtgtgtgaaccagtaccgcaaggatagcaaggtatgaacacttgtggacgaaatggtaagtgatcaattcactttcatggccggaaggtcacgtggcaatcatgccacccaggtaccctcctctgggaggatctgagggtgggctaagcagaccctgccatgtggctgaacttttcccttattgttttactttgtaacatttatagttgtgttagtgatttgtgtgttgtgcccttgtgagctatatccagtataagttcgcagctagaagttaatccttcgacatcggctgtattggaa

SEQ ID NO: 152 - RNA, 509 nt, synthetic construct
  source 1..509: mol_type = other RNA
gttatccgcttatgtacttcgagaagcccagtaccacctcggaatcttcgatgcgttgcgctcagcactcaaccccagagtgtagcttaggctgatgagtctggacatccctcaccggtgacggtggtccaggctgcgttggcggcctacctatggctaacgccatgggacgctagttgtgaacaaggtgtgaagagcctattgagctacataagaatcctccggcccctgaatgcggctaatcccaacctcggagcaggtggtcacaaaccagtgattggcctgtcgtaacgcgcaagtccgtggcggaaccgactactttgggtgtccgtgtttccttttattttattgtggctgcttatggtgacaatcacagattgttatcataaagcgaattggattggccatccggtgaaagtgagattcattatctatctgtttgctggattcgctccattgagtgtgtttactctaagtacaatttcaacagttatttcaatcagacaatt

SEQ ID NO: 153 - RNA, 629 nt, synthetic construct
  source 1..629: mol_type = other RNA
cacccatacacccccacccccttttctgtaactcaagtatgtgtgctcgtaatcttgactcccacggaatggatcgatccgctggagaacaaactgctagatccacatcctccctccccttgggaggacctcggtcctcccacatcctccctccagcctgacgtatcacaggctgtgtgaagcccccgcgaaagctgctcacgtggcaattgtgggtccccccttcatcaagacaccaggtctttcctccttaaggctagccccgatgtgtgaattcacattgggcaactagtggtgtcactgtgcgctcccaatctcggccgcggagtgctgttccccaagccaaacccctggcccttcactatgtgcctggcaagcatatctgagaaggtgttccgctgtggctgccagcctggtaacaggtgccccagtgtgcgtaaccttcttccgtctccggacggtagtgattggttaagatttggtgtaaggttcatgtgccaacgccctgtgcgggatgaaacctctactgccctaggaatgccaggcaggtaccccaccttcgggtgggatctgagcctgggctaattgtctacgggtagtttcatttccaattcttttatgctggagtc

SEQ ID NO: 154 - RNA, 679 nt, synthetic construct
  source 1..679: mol_type = other RNA
gtgttactccattcagcttcttcggaacctgttcggaggaattaaacgggcacccatactcccccccaccccccttttgtaactaagtatgtgtgctcgtgaccttgactcccacggaacggaccgatccgttggtgaacaaacagctaggtccacatcctcctttcccctgggagggtccccgccctcccacatcccccccccagcctgacgtgtcacaggctgtgtgaagcccccgcgaaagctgctcacgtggcaattgtgggtccccccttcatcaagacaccaggtctttcctccttaaggctagccccggcgtgtgaactcacgttgggcaactagtggtgtcactgtgcgctcccaatctcggccgcggagtgctgttccccaagccaaacccctggcccttcactatgtgcctggcaagcacacctgagaaggtgttccgctgtggctgccagcctggtaacaggtgccccagtgtgcgtaaccttcttccgtcttcggacggtggtgattggttaagatttggtgtaaggttcatgtgccaacgccctgtgcgggatgaaacctctactgccctaggaatgccaggcaggtaccccaccttcgggtgggatctgagcctgggctaattgtctacgggtggtttcatttccaattctttcatgtcggagtc

SEQ ID NO: 155 - RNA, 677 nt, synthetic construct
  source 1..677: mol_type = other RNA
gttactccattcagcttcttcggaacctgttcggaggaattaaacgggcacccatacacccccacccccttttctgcaacttaagtatgtgtgctcgtaatcttgactcccacggaacggatcgatccgctggagaacaaactgctagatccacatcctcccttcccctgggaggaccccggtcctcccacatcctccccccagcctgacgtaacacaggctgtgtgaagtccccgcgaaagctgctcacgtggcaattgtgggtccccccttcaccaagacaccaggtctttcctccttaaggctagccccgatgtgtgaattcacattgggcaactagtggtgtcactgtgcgctcccaatctcggccgcggagtgctgttccccaagccaaacccctggcccttcactatgtgcctggcaagcatatctgagaaggtgttccgctgtggctgccagcctggtaacaggtgccccagtgtgcgtaaccttcttccgtctccggacggtagtgattggttaagatttggtgtaaggttcatgtgccaacgccctgtgcgggatgaaacctctactgccctaggaatgccaggcaggtaccccaccttcgggtgggatctgagcctgggctaattgtctacgggtagtttcatttccaattcttttatgtcggagtc

SEQ ID NO: 156 - RNA, 610 nt, synthetic construct
  source 1..610: mol_type = other RNA
gtaacttcaagtgtgtgtgctcgtaatcttgactcctgccggaatgccgcccggttcagtgaacaaacagctaggcaagtccctcccttcccctgtggtcggttctcaccggccaccatccctcccccagcctgacgtgttacaggctgtgcaaagcccccgcgaaagctgctcacgtggcaattgtgggtcccccctttgtcaagacaccgagtctttctcccttaaggctagcccggtcccacgaacgtggaactggcaactagtggtgtcactacacgcctccgacctcggacgcggagtgctgttccccaagctgtaaccctgacccaagactgtgctgcctggcaagcaccgtctgggaagatgttccgctgtggctgccaaacctggtaacaggtgccccagtgtgtgtagtcttcctccagtctccggactggcagtcttgtgtaaagatgcagtgtaaggttcaagtgccaaatccctggaaggagtgaccctctactgccctaggaatgctgtgcaggtacccccaacttcggttggggatctgagcacaggctaattgtctacgggtagtttcatttcccatcctctcttttttggcatc

SEQ ID NO: 157 - RNA, 576 nt, synthetic construct
  source 1..576: mol_type = other RNA
tttgaaaagggggtgggggggcctcggccccctcaccctcttttccggtggccacccgcccgggccaccgttactccactccactccttcgggactggtttggaggaacataacagggcttcccatccctgtttacccttactccactcacccctccccttgaccaaccctatccacaccccactgactgactcctttggatcttgacctcggaatgcctacttgacctcccacttgcctctcccttttcggattgccggtggtgcctggcggaaaaagcacaagtgtgttgttggctaccaaactcctacccgacaaaggtgcgtgtccgcgtgctgagtaatgggataggagatgccaataacaggctcgcccatgagtagagcatggactgcggtgcatgtgacttcggtcaccaggggcatagcattgctcacccctgaatcaagtcatcgagatttctctgacctctgaagtgcactgtggttgcgtggctgggaatccacgcttgaccatgtactgcttgatagagtcgcggctggccgactcatgggttaaagtcagttgacaagacac

SEQ ID NO: 158 - RNA, 513 nt, synthetic construct
  source 1..513: mol_type = other RNA
ccaccgttacttcactccactccctcgggactggtttggaggagcataacagggcttcccatccctgttcaccctcaataccacccaccctttccctcaaccatccctatccacaccccactgactgattcccttggattttgacctcagaacgcctacttgacctcccacttgcctttcccttctcggattgccggtggtgcctggcggaaaaagcacaagtgtgttgcaggctaccaaactcctacccgacaaaggtacgtgtccgcgtgctgagtaatgggataggagatgcctacaacaggctcgcccatgagtagagcatggactgcggtgcatgtgacttcggtcaccacgggcatagcattgctcacccgtgaatcaagtcattgagattcctctgacctctgaagtgcactgtggttgcgtggctgggaatccacgcttgaccatgtactgcttgatagagtcgcggctggccgactcatgggttaaagtcagttgataagacac

SEQ ID NO: 159 - RNA, 683 nt, synthetic construct
  source 1..683: mol_type = other RNA
tttgaaaagggggtggggggggcctcggccccctcaccctcttttccggtggccacgcccgggccaccgatacttcccttcactccttcgggactgttggggaggaacacaacagggctcccctgttttcccattccttcccccttttcccaaccccaaccgccgtatctggtggcggcaagacacacgggtctttccctctaaagcacaattgtgtgtgtgtcccaggtcctcctgcgtacggtgcgggagtgctcccacccaactgttgtaagcctgtccaacgcgtcgtcctggcaagactatgacgtcgcatgttccgctgcggatgccgaccgggtaaccggttccccagtgtgtgtagtgcgatcttccaggtcctcctggttggcgttgtccagaaactgcttcaggtaagtggggtgtgcccaatccctacaaaggttgattctttcaccaccttaggaatgctccggaggtaccccagcaacagctgggatctgaccggaggctaattgtctacgggtggtgtttcctttttcttttcacacaactctactgctgacaactcactgactatccacttgctctcttgtgcctttctgctctggttcaagttccttgattgtttttgactgcttttcactgcttttcttctcacaatccttgctcagttcaaagtc

SEQ ID NO: 160 - RNA, 750 nt, synthetic construct
  source 1..750: mol_type = other RNA
ttccccttcccccttttcacggcccggccgcccgccgggtcgtcacccgttcagacacctacgggttatctgttcgggctataaatatgggcattcctcttcccccttccccttttgaagatgagtgcgcatattcttgactccgcctggattggccgcccaaggcgtgaacaagcagctaggccaccatgacactgcggtggtgtccgaacccgcgggtgccttcacgggcacctgtggtatgtaggactcccaccgtggtcttccctttccccctcaatctttccccctggttcgactaacgggaccagtgctggaacctgtccggtgaacggtatagcaggcccccccggcagaaacacccggtgcttaccccttaaggctagcccccttccatgaatttggttggggcaactagtgggtgtacagttggcgtgaaccctccggtctaggagtgctcttgcccaatcctctgtgtgtgccttgcagtagggactggcaatccttcgcgtaggtgatccgctgtgccatgccatcctggcgacaggaggcccagtgtgcgcaacctacgtcccttctgggtgctgcattgcattacctttggagtaagcttggtgtgccgaaaccccagggtttacgtaccactcgtggtgtgaggaatgtgccgcaggtaccccatccttgaggtgggatctgagcggtagctaattgtctagcaccactttcttccttttttctttgctggtcacg

SEQ ID NO: 161 - RNA, 457 nt, synthetic construct
  source 1..457: mol_type = other RNA
tacgcatgtattccacactcatttcccccctccacccttaaggtggttgtatccccataccttaccctcccttccacaatggacggacaaatggatttgacctcacggcaaacacatatggtatgatttcggatacaccttaacggcagtagcgtggcgagctatggaaaaatcgcaattgtcgatagccatgttagtgacgcgcttcggcgtgctcctttggtgattcggcgactggttacaggagagtaggcagtgagctatgggcaaacctctacagtattacttagagggaatgtgcaattgagacttgacgagcgtctcctcggagatgtggcgcatgctcttggcattaccatagtgagcttccaggttgggaaacctggactgggcctatactacctgatagggtcgcggctggccgcctgtaactagtatagtcagttgaaaccccccc

SEQ ID NO: 162 - RNA, 489 nt, synthetic construct
  source 1..489: mol_type = other RNA
ttgaaatgggtgtggggtacatgcgtattacggtacgcatatattccacactcatttccccccctccacccttaaggtggttgtatccccataccttaccctcccttctaaaacagatggacaaatggatttgaacttatggcaagtgaatatggtatgactttggatacactttaacggcagtagcgtggcgagctatggaaaaatcgcaattgtcgatagccatgttagtgacgcgcttcggcgtgctcctttggtgattcggcgactggttacaggagagtaggcagtgagctatgggcaaacctctacagtattacttagagggaatgtgcaattgagacttgacgagcgtctcttagagatgtggcgcatgctcttggcattaccatagtgagcttccaggttgggaaacctggactgggcctatactacctgatagggtcgcggctggccgcctgtaactagtatagtcagttgaaacccccc

SEQ ID NO: 163 - RNA, 741 nt, synthetic construct
  source 1..741: mol_type = other RNA
ctcacactcatttcccccctcgcctgtcacaggcaacccccaccccttctcttacgggagttagggccaaggatctgttgcataggcgttgtatcccctaaccttttacctacccatcccaataggactggtatttcggttttgattgagtaatggatactgattctatacctgttacccattcaggggaaaaatggagtttctttcatggatctgacttgatatgaccaagagtcaacactttgcgtgttggccgtatggaatgctttaaggtttattctttggattatgacttcagggttggccgcccaggataaaaggcaattgtggtaagtgatgttagtcattggtggttgaaacctgcctaagacgtcctaggtctacgctgtgcgggccgaagtaagcttaggaataacagggagtatgccattttctgctttcacccaacacgaccgtacacgaaagagctagaggcactttggggcaaagggaaaagctttgcttagcccgaatgttcatttgagtccttgacgaatgcgtcccgtctgtcccgacggtgaggcgtatggcgcatgctcatggcattacccaatggtgtatctgtgaggggggggctcctcacacttagtctagtgctacctgacagggccgcggctggtcgtttgtgtatggtataaccagtagtaatcccccatggattgctttaacttcccctcctcccttaccaagacattctctaag

SEQ ID NO: 164 - RNA, 579 nt, synthetic construct
  source 1..579: mol_type = other RNA
ttttaacttgttatgacattcaagggaaaaatgtctttttcattatgggactgacctgtttatgaacatgagcagcggcactgctccacgggctatccgtgtaagaaatattgattattcttatggatcatgatttcagggttggccgcccagtctaaaaggcaattgtggtaagctatgtaagtagttggctgttgaaaggagccaagtacatcctaggtctacgctgtgcgggccgaagtaagacttggaacaactctgagtaggcagtttttctctttagcccaacacgaccgcatactgaagagctagaggcactttggggcaaaggtaaaagcattgcttagaccgaatgttcaatgagaccttgacgagtgctgtcacagtgtcccctgatggcagtatggcgcatgctcttggcattacccatatgtgtatctatagggggggggccccctatacttagtctagtgctacctgacagggccgcggctggtcgtcggtgtgtggtataaccagtagtaatcccccatggattgctttaactccccctcctccctcaacaaaactttctctaag

SEQ ID NO: 165 - RNA, 522 nt, synthetic construct
  source 1..522: mol_type = other RNA
ccgggtataacccggagttttggggcaggtccaagccccacataggaacatacgatccacggatcgtgtgttcttttatgctttctaaccttaccctttgtaaccattacgctttacgccgcatggtgtttggcggcaccatgacgtggacaagaggttacgccattacgatatgtaccctccccttttggggagagaccgaccaattatggtacagtatccaactgtattgtggtcaagtacttctgtttccccggtgatgcgggataggctgtacccacggccaaaacctgctgatccgttacccgactcacatctacgaggaggctagtaaaaggcatgaagttcaagagtatgatccaaccagatccccactggtaaactagtgatgagggttcccgttccgaacatggcaacatgtgggttccctgcgttggcactaggccccttccgaggggtgctctgaagatggattgttgatgaagaccaatttgtgcatgtgtttatcctccggccctctga

SEQ ID NO: 166 - RNA, 553 nt, synthetic construct
  source 1..553: mol_type = other RNA
ttgaaagacctcggcatatatcgttgtcacaacggtatatgtcgagatctttctccccaccccctccaattcccttttccccctcttgcaacttagaagtttgtacacacagggcaataggatacgtgatccagccaggacacgtgagctcaagcacttctgtttccccgtccccttcacgtactacgggaatgttagtaatttgtgtgcactttagtaaggttgatccgggattaaccccaaatcccagaaactggtgatgagcgttaccacccccgccgggcgaccggaaggtttcgctgcgttggcaccagggcttcggcaccagaaaaaggtaaagcaaatgaaggcgctactgtgctacgagaagtttcctccaggcccctgaatgcggctaatcctaaccagtgatccaccggtgcaaaaccatgtactaggtggtcgtaacgcgcaagtcgctggcggaaccgactactttgggtgtcctgtgtttccatattttattttattcaattttatggtgacaagagtaaagagatacagatttgcagcc

SEQ ID NO: 167 - RNA, 512 nt, synthetic construct
  source 1..512: mol_type = other RNA
ttttctcccctccccctccaactaccttttccccctcttgtaacgctagaagtttgtgcaaaccgcctgtagggtactgcaatccagcagtgcataggctaagcttttcttgttaccccaccccacattatactgaggaggattgtgaaattgtgttagtatgggttagtagcggtgacccgggtaaccccaacccagaaactcacggatgagatgaacaggaccccacatggtaacgtgtgtgttcgtctgccccgcaaggtgaggccgtgagagctttgcacgcgaaaaccttgaaaacccaaaagtaccttgagctcttcgctattttgtgtttcctccaggaccctgaatgcggctaaacctaacccgcgatccgcacgtagcaacccagctagagtgtggtcgtaatgcgcaagttgcgggcggtaccgactactttggtgttcctgtgtttcctttattttattttgaatttttatggtgacaacagctagaaaataagagtgaac

SEQ ID NO: 168 - RNA, 615 nt, synthetic construct
  source 1..615: mol_type = other RNA
ttaaaactgggtttgggttgttcccacccaaaccacccacgcggtgttgtacactgttattccggtaaccttgtacgccagttttatatcccttcccccccttgtaacttagaagacatgcgaatcgaccaatagcaggcaatcaaccagattgtcaccggtcaagcacttctgtttccccggctctcgttgatatgctccaacagggcaaaaacaattggagtcgttacccgcaagatgcctacgcaaaacctagtagcatcttcgaagatttttggttggtcgctcagttgctaccccagcaatagacctggcagatgaggctagaaataccccactggtgacagtgttctagcctgcgtggctgcctgcacacccacacgggtgtgaagccaaagattggacaaggtgtgaagagtcacgtgtgctcatcttgagtcctccggcccctgaatgcggctaaccttaaccccgtagccattgctcgcaatccagcgagtatatggtcgtaatgagtaattacgggatgggaccgactactttgggtgtccgtgtttcactttttacttatcaatttgcttatggtgacaatatatatagatatatattgacacc

SEQ ID NO: 169 - RNA, 660 nt, synthetic construct
  source 1..660: mol_type = other RNA
acatgggccagcccaccacacccactgggtgtagtagtctggttctatggaacctttctacgcctcttttgcttccctcccccatttctccttcgattgctccacctgtgatctttgcaacttagaagaaataatgaacccgcacaatagcgggcgctgagccacagcgtcaatgtgcaagcacttctgtttccccggaatgggcccataggctgtacccacggctgaaagggaccggcccgttacccgccttggtactgcgagaatgttagtaactccctcgatagctttaggcgttacgctcagccctttgagcccgaagggtagttcgggtcgatgaggctcgtcattccccactggcgacagtgtgacttgcctgcgttggcggcccggggtggggggcaacccccatccacgcctactgaaggacagggtgtgaaggcgctattgcgctactaaggagtcctccggcccctgaatgcggctaacccgaaccccgagcccacggtggtaaacccgccacaagtgggtcgtaatgagtaatttggggcagggaccgactactttgggtgtccgtgtttcctgtttttccatacgatggctgcttatggtgacaaccataagcaattggattggccatccggtgttcatattgcgaat

SEQ ID NO: 170 - RNA, 822 nt, synthetic construct
  source 1..822: mol_type = other RNA
tttaaaagagcctgggggttgttcccacccccaggatgcccactcgtgggcatgtggtactgtggtatcgcggtaccacagtacgcctctttgaccgccctgacccaagaatcttttcctttaacagatctcttcgtaacaagggcctcagcctgacgcaagtgcctccattggagtctctccaagccctccggggcttggagggcgccgaccccctgcctagggggagcccacgacacggctggagtccattggcacaccgcagccacgattcaagccagaattgaaagcgggaagcacttctgtctccccggtgtggatcatacgctgtacccacggcgaaaagtgaagcatcgttacccgactcggtacttcgagaagcccagtacagttgtggatctctgcagggtatacgctcagcgtgacccctacgtagttccttgagatggctgagagaacaccccacgggcgaccgtgtctctcggcgcgtggctcaaggccgggccttcagtggctcggtgccttgcagagtgaagcctccgaacagcctattgagctaccgtttagcctccgccctcttgaatgcggctaatcctaaccatggagcgcccgcccacagtccagtgggtagagcgtcgtaacgcgcaagtccgtggcggaaccgactactttagagtggcgtgtttccaatttatcctttataaagttgcttatggtgacaccacaagagatccacgatttcttgtttcttatcactgagacacaagtcatattcatcaatctttattgcggaattaacttggtgcgtccaaacacatcagc

SEQ ID NO: 171 - RNA, 699 nt, synthetic construct
  source 1..699: mol_type = other RNA
ttaaaatagcctcagggttgttcccaccctgagggcccacgtggcgtagtactctggtatcaaggtacctttgtacgcctattttatttcccttcccccacagtaacttagaagcttatctcatagttcaacagtagggtcactaaccaagtggctcagcgaacaagcacttctgtttccccggtcctagtacctgtgaagctgtacccacggcggaaggggaaaaagatcgttatccggccccctacttcggaaagcctagtaacaccattgaagcaatcgagtgttgcgctcagcacagtaacccctgtgtagctttggttgatgagtctgggcactccccactggcgacagcggcccaggctgcgttggcggccaaccgactcgggcaaccgggtcggacgctcgtttgtggacatggtgtgaagagcctactgagctagagggtagtcctccggcccctgaatgcggataatcctaaccccggagcacccacactcaatccagagtgcaggatgtcgtaacgcgtaagtctgggacggaaccgactactttgggtgtccgtgtttcctgttttacttactttggctgcttatggtgacaatctagtgttgttaccatatagctattggattggccatccggtgttttgaattgtgtgtttatactaattcttttacatatcacagacaaccaaat

SEQ ID NO: 172 - RNA, 737 nt, synthetic construct
  source 1..737: mol_type = other RNA
ttaaaatagcctcagggttgttcccaccctgagggcccacgtggcgtagtactctggtattacggtacctttgtacgcctattttacccccttccccttgtaacttagaagcaaagcaaaccagttcaatagtaagcaacacaacccagtgttgtgacgaacaagtacttctgtttccccgggagggtctgacggtaagctgtacccacggctgaagtatgacctaccgttaaccggctacctacttcgagaagtctagtaataccattgaagttttgttggcgttacgctcaacacactaccccgtgtgtagttttggctgatgagtcacggcattccccacgggcgaccgtggccgtggctgcgttgcggccaaccaaggggcgcaagctccttggacgtcacttaacagacatggtgtgaagaacctattgagctaggtagtagtcctccggcccctgaatgcggctaatcctaactccggagcacatcagtgcaacccagcatttggtgtgttgtaatacgcaagtctggagcggaaccgactactttgggtgtccgtgtttcctgttttaccttatttggctgcttatggtgacaatttgatattgttaccatatagctgttggattggccatccggatttttgaaagagacccaaaactttcttctctacttcagattcaagtgcgaagttttccttttcatatattacttactaatttgaagtaccaaag

SEQ ID NO: 173 - RNA, 847 nt, synthetic construct
  source 1..847: mol_type = other RNA
ttaaaacagcctgggggttgttcccacccccagggcccacgtggcgcaagtactctgcttcgttagaagccttgtacgcctgttttcccctccttaaacaaattaagattgccacttccgaggggagtagtccgactccgctccgatacgtcgctccagtgcgctagtacgcttagtactttctcacggggatagtggtatccctccctagtaatttagaagacttgaaaaaccgaccaataggcacctcgcatccagcggggtaaaggtcaagcacttctgtttccccgggtcgagtagcgatagactgtgcccacggtcgaaggtgaaacaacccgttatccgactttgtacttcgggaagcctagtaccaccaaagattatgcttggggtttcgctcagcacgaccctggtgtagatcaggccgatggatcaccgcattcctcacaggcgactgtggcggtggtcgcgtggcagcctgccgatggggcaacccatcggacgccaagcatatgacagggtgtgaagagcctactgagctacaaagtattcctccggcccctgaatgcggctaatcccaaccacggagcatttgctaccaaaccaggtagtggaatgtcgtaacgggtaactctgtggcggaaccgactactttgggtgtccgtgtttccttttaatttatcattctgtatatggtgacaactatagtgctatctcgatttgcattactattgttgagattaaaactttattacattgttgcattttaccctttgagtgagttttcacctgaacagattaatttactcatcctgtttatatattacaagcagaaatacttgcaaag

SEQ ID NO: 174 - RNA, 822 nt, synthetic construct
  source 1..822: mol_type = other RNA
tttaaacagcctgggggttgttcccacccctggggcccacgtggcgctagtactctggtacgctagtacctttgtacgcctgtttttcccctcccttaaataaatcaaggttgccactactgaggggagtagtccgactccgctccagcaatgctgcaccagtgcactggtacgctagtaccttttcacggagtagatggtatcccttaccccggaacctagaagattgcacacaaaccgaccaataggcgcaccgcatccagccgtgcagcggtcaagcacttctgtctccccggtctgtaaagatcgttatccgcccgacccactacgaaaagcctagtaactggccaagtgaacgcgaagttgcgctccgccacaaccccagtggtagctctggaagatggggctcgcaccacccccgtggtaacacggttgcctgcccgcgtgtgcttccgggttcggtctcgtgccgttcacttcaacttcacgcaaccagccaagagcctattgtgctgggacggttttcctccggggccgtgaatgctgctaatcccaacctccgagcgtgtgcgcacaatccagtgttgctacgtcgtaacgcgtaagttggaggcggaacagactactttcggtaccccgtgtttcctctcattttatttaatattttatggtgacaattgttgagatttgcgctcttgcaacgttgccattgaatattggcttatactatttggttgccttttacaaaacctctgatatacccagttcttacattgatctgcttgtttttctcaatttgaagtatagactacaaatagcaaa

SEQ ID NO: 175 - RNA, 714 nt, synthetic construct
  source 1..714: mol_type = other RNA
ttaaaacagcctgtgggttgttcccaccccagaggcccacgtggcggccagtactctggtatcacggtacctttgtacgcctgttttatatccccttcccccgcaacttagaagaaaacaaatcaagttcactaggagggggtacaaaccagtaccaccacgaacaagcacttctgtttccccggtgatgtcgtatagactgtaaccacggttgaaaacgattgatccgttatccgctcttgtacttcgaaaagcccagtatcaccttggaatcttcgatgcgttgcgctcagcactcaaccccagagtgtagcttaggtcgatgagtctggacactcctcaccggcgacggtggtccaggctgcgttggcggcctacctgtggtccaaagccacaggacgctagttgtgaacaaggtgtgaagagcctattgagctacaagagaatcctccggcccctgaatgcggctaatcctaaccacggagcaagggtacacaaaccagtgtatatcttgtcgtaacgcgcaagtctgtggcggaaccgactactttgggtgtccgtgtttccttttgtttttatcatggctgcttatggtgacaatctaagattgttatcatatagctgttggattggccatccggtaatttattgagatttgagcatttgcttgtttcttcaacaatttcacctattcattgcatttcagcagtcaaa

SEQ ID NO: 176 - RNA, 742 nt, synthetic construct
  source 1..742: mol_type = other RNA
ttaaaacagctctggggttgttcccaccccagaggcccacgtggcggctagtacactggtatcacggtacctttgtacgcctgttttatactccctcccccgcaacttagaagcatacaattcaagctcaataggagggggtgcaagccagcgcctccgtgggcaagcactactgtttccccggtgaggccgcatagactgttcccacggttgaaagtggccgatccgttatccgctcatgtacttcgagaagcctagtatcgctctggaatcttcgacgcgttgcgctcagcactcaaccccggagtgtagcttgggccgatgagtctggacagtccccactggcgacagtggtccaggctgcgctggcggcccacctgtggcccaaagccacgggacgctagttgtgaacagggtgtgaagagcctattgagctacatgagagtcctccggcccctgaatgcggctaatcctaaccatggagcaggcagctgcaacccagcagccagcctgtcgtaacgcgcaagtccgtggcggaaccgactactttgggtgtccgtgtttccttttattcttgaatggctgcttatggtgacaatcatagattgttatcataaagcgagttggattggccatccagtgtgaatcagattaattactcccttgtttgttggatccactcccgaaacgttttactccttaacttattgaaattgtttgaagacaggatttcagtgtcaca

SEQ ID NO: 177 - RNA, 745 nt, synthetic construct
  source 1..745: mol_type = other RNA
ttaaaacagctctggggttgttcccaccccagaggcccacgtggcggctagtactctggtatcacggtacctttgtacgcctgttttacatcccctcccccacgtaactttagaagcaattcaacaagttcaatagagggggtacaaaccagtatcaccacgaacaagcacttctgtttccccggtgattttacataagctgtgcccacggctgaaagtgaatgatccgttacccgctcgagtacttcgaaaagcctagtatcgctttgggatcttcgacgcgttgcgctcagcactctaccccgagtgtagcttaggctgatgagtctgggcattccccatcggcgacgatggcccaggctgcgttggcggcctacccatggctaacgccatgggacgctagttgtgaacaaggtgtgaagagcctattgagctactcgagagtcctccggcccctgaatgcggctaatcccaaccacggatcaggtgcctccaacccaggaggtggcctgtcgtaacgcgcaagtctgtggcggaaccgactactttgggtgtccgtgtttccttttatcttttaaatggctgcttatggtgacaatcatagattgttatcataaagcgaattggattggccatccggtgaaatacaaacacattatttacttgtttgttggatttactccgctcacacagcttactcctaagataatatttattgtattgctggtaaggagacactattata

SEQ ID NO: 178 - RNA, 750 nt, synthetic construct
  source 1..750: mol_type = other RNA
ttaaaacagcctgtgggttgatcccacccacagggcccactgggcgccagcacactggtatcgtggtacctttgtgcgcctgttttataccccctacccccacatgtactctagaagcaaggcaaacctgaccaatagtaggtgtggcacaccagccgcattttggtcaagcacttctgtttccccggaccgagtatcaataagctgctcacgcggctgaaggagaaaccgttcgttacccgaccagctacttcgagaaacctagtaacactatgaacgttgcggagtgtttcgttcagcacttcccccgtgtagatcaggtcgatgagtcaccgcattcctcacgggtgaccgtggcggtggctgcgttggcggcctgcctacgggttcgcccgtaggacgctctaataccgacatggtgtgaagagtccattgagctagctggtagtcctccggcccctgaatgcggctaatcctaactgcggagcaggtgctcacagaccagtgagtagcctgtcgtaacgggcaactctgcagcggaaccgactactttgggtgtttttccttttttcttctcttatattggctgcttatggtgacaattaaagaattgttaccatatagctattggattggccatccggtgacgagcagagccattgtttacctctttgttggatttgtacctttgaaccacaaagtcttgaataccattcatctcattttaaagttcaactcagctaaaagaaa

SEQ ID NO: 179 - RNA, 722 nt, synthetic construct
  source 1..722: mol_type = other RNA
ttaaaatagcctgtgggttgctcccacccacagggcccaagtggcgtagtacttggtattccggtacctttgtacacctatttacaaaccctaccccttgtaaccttagaagcaattatttaaccgctcactagggggtgtgctatccaagcacatcaagagcaagcacttctgtctccccgggaggggctaatggtacgctgtgcccacggcggaaatgagccctaccgttaaccggcagtctacttcgggaagcccagtaactacattgaaactttgaggcgttacactcagcacataaccccaatgtgtagttctggtcgatgagccttggcatcccccacaggcgactgtggccaaggctgcgttggcggccagcctgcggaccaaaagtccgtaggacgcctaattgtggacatggtgtgaagagcctactgagctagactgtagtcctccggcccctgaatgcggctaatcctaaccctggagcatccgcgtgcaacccagtacgtagggtgtcgtaatgcgtaagtctgggatggaaccgactactttgggtgtccgtgtttcttgtttttcatactgggtcgcttatggttacaactaattgttgtaatcattggcagtgcgcgctgaccacgcgattattgatatttccatttgttggatactccaatagtgtcaactcatatacacaacttttaccactgatcaagataaaa

SEQ ID NO: 180 - RNA, 747 nt, synthetic construct
  source 1..747: mol_type = other RNA
ttaaaacagcctgtgggttgttcccacccacagggcccactgggcgctagcactctggttctccggaacctttgtgcgcctgttttgaaaccccctcccccaactcgaaacgtagaagtaatgtacactactgatcagtagcaggcgtggcgcaccagccatgtctcgatcaagcacttctgtttccccggactgagtatcaatagactgctcacgcggttgaaggtgaaaacgtccgttacccggctaactacttcgagaaacctagtagcaccatagaaactgcagagtgtttcgctcagcacttcccccgtgtagatcaggtcgatgagtcactgcaatccccacgggtgaccgtggcagtggctgcgttggcggcctgcctatggggcaacccataggacgctctaaggtggacatggtgtgaagagtctattgagctagttagtagtcctccggcccctgaatgcggctaatcctaactgtggagcgcatactcccaaaccagggagcagtgcgtcgtaacgggcaactccgcagcggaaccgactactttgggtgtccgtgtttccttttattcctatactggctgcttatggtgacaattgagagattgttaccatatagctattggattggccatccagtgtgtaatagagcaatcatttaccaatttgttggatttactccattaacccacacgtctctcaacacactacatttcatcttactactgaacactagaaa

SEQ ID NO: 181 - RNA, 509 nt, synthetic construct
  source 1..509: mol_type = other RNA
ctccccccccttccccttcccgagtaggagattggcatgtatgctctacatgcccgattctctcttgctcactctcttaaatcctggtggcggtctcggattaaacatttatgtcgtatctgggatcgtcttacttggtggtaattcctctgttgcctagggacctccggactgccggattaaaggtctcaacagagggcaatgtacaaggaagtcattatacgctaattaagtatttgatgaatgactagtgtgacagggctgaggaactccccccgggtaaccggtgcctcagcgtccgaaagacacgtggataggatccaccctgttatacccagcacgatgtaatagtcaaatacctctgatttgtgtaggatgtataaattgtgcattgtaaattttgggcgtagagatgctccgaaggtaccccgttttacgggatctgatcggaggctaattacccaatgcgccctaaataacttcatataatttctttttctttattcaaa

SEQ ID NO: 182 - RNA, 466 nt, synthetic construct
  source 1..466: mol_type = other RNA
atggggaagggtatgacgtgccccttccttcttcggagaactcgctctagtggtctttccacttctggaaaagagtgagtgcacgtgatcaggaccgtcgaagacgacaaatacctggtgctctatctcatagacgtttcacagctgtagcgacccctcagtagcagcggaagccccctcctggtgacaggagcctctgcggccaaaagccacgtggataagatccactgctgagggcggtgcgaccctagcaccctgtgatgcatactagttgtagcgtgccggactattggtctgtcataagacacctgatagagagaccaagaatgtcctggaggtaccccgcgtgcgggatctgaccaggagaccattgcccaatgctttacaacgggtctatggtttaaaaactgtcgcagtctctccaaaccaagtggtcttggttttcaattactttgaatatttcact

SEQ ID NO: 183 - RNA, 884 nt, synthetic construct
  source 1..884: mol_type = other RNA
aagaccatatatcttatcccttgaatgctggctaatcagaggaaagtcagcattttccggcccaggctaagagaaacatataagttagatttgatttaaatcccttgacgaattcgaaacgagatgttctccctcccttgccgcttgttcacacccacttatttaattcggccttttgtgacaagcccctcggtgaaagaacctctctcttttcgacgtggttggaattgccatcatttccgacgaaagtgctatcatgcctccccgattatgtgatgttttctgccctgctgggcggagcattctcgggttgagaaaccttgaatctttttctttggaaccttggttcccccggtctaagccgcttggaatatgacagggttattttcttgatcttatttctacttttgcgggttctatccgtaaaaagggtacgtgctgccccttccttctctggagaattcacacggcggtctttccgtctctcaacaagtgtgaatgcagcatgccggaaacggtgaagaaaacagttttctgtggaaatttagagtgcacatcgaaacagctgtagcgacctcacagtagcagcggactcccctcttggcgacaagagcctctgcggccaaaagccccgtggataagatccactgctgtgagcggtgcaaccccagcaccctggttcgatgatcattctctatggaaccagaaaatggttttctcaagccctccggtagagaagccaagaatgtcctgaaggtaccccgcgtgcgggatctgatcaggagaccaattggcggtgctttacactgtcactttggtttaaaaattgtcacagcttctccaaaccaagtggtcttggttttccaattttgttgaatggcaat

SEQ ID NO: 184 - RNA, 1052 nt, synthetic construct
  source 1..1052: mol_type = other RNA
ggggatctcccccgcggcagctggttacagctgtcgcggacggagatcatcccccggccaccccctttcgacgcgggtactgcgatagtgccaccccagtctttcctactcccgactcccgactctaacccaggttccttggaacaggaacaccaatatactcatcccctggatgctgactaatcagaggaacgtcagcattttccggcccaggctaagagaagtagataagttagattccaaattgatttatcatccccttgacgaattcgcgttggaaatgcacctctcacttgccgctcttcacacccattaacttgattcggcctctgtgttgagccccttgttgaagtgcttccctccatcgtgacgtggttggagatctaagtcaaccgactccgacgaaactaccatcatgcctccccgattatgtgatgctttctgccctgctgggtggagcatcctcgggttgagaaaaccttcttcctttttccttggaccccggtcccccggtctaagccgcttggaataagacagggttatcttcacctcttccttcttctacttcatagtgttctatactatgaaagggtatgtgtcgccccttccttctttggagaacacgcgcggcggtctttccgtctctcgaaaagcgcgtgtgcgacatgcagagaaccgtgaagaaagcagtttgcggactagctttagtgcccacaagaaaacagctgtagcgaccacacaaaggcagcggaccccccctcctggcaacaggagcctctgcggccaaaagccacgtggataagatccacctttgtgtgcggcacaaccccagtgccctggtttcttggtgacacttcagtgaaaacgcaaatggcgatctgaagcgcctctgtaggaaagccaagaatgtccaggaggtaccccttccctcgggaagggatctgacctggagacacatcacatgtgctttacacctgtgcttgtgtttaaaaattgtcacagctttcccaaaccaagtggtcttggttttcactctttaaactgatttcact

SEQ ID NO: 185 - RNA, 930 nt, synthetic construct
  source 1..930: mol_type = other RNA
gaccctaacccaggttcctcggatcaggaacacaaatttactcatcccctggatgctgactaatcagaggaaagtcagcattttccggcccaggctaagagaagtagataagttagattccaaattgacctaccatccccatgacgaattcacattggaaatacacctctcacttgctgctcttcacacccatcaattaattcggcccactgtgttgagcccctcgttgaagtgtttccctccttcgtgacgtggttggagatccaagtcatccgactccgacgaaactaccatcatgtctccccgattatgtgatgctttctgccctgctgggtggagcatcctcgggttgagaattccttcttcctttctccttggacctcggtcccccggtctaagccgctcggaatatgacagggttattttcacctcttctctcttctacttcatagtgttctatactatgaaagggtatgtgtcgccccttccttcttggagaacgtgcgtggcggtctttccgtctctcgaaaaacgtgcgtgcgacatgcagagtaacgcaaagaaagcagttcttggtctagctctggtgcccacaagaaaacagctgtagcgaccacacaaaggcagcggaaaccccctcctggtaacaggagcctctgcggccaaaagccacgtggataagatccacctttgtgtgcggtgcaaccccagcaccctggtttcttggtgacaccttagtgaaccctcgaatggcaatctcaagcgcctctgtaggaaagccaagaatgtccaggaggtaccccttcctcatggagggatctgacctggagacacatcacacgtgctatacacttgtgcttgtgtttaaaaattgtcacagctttcccaaaccaagtggtcttggttttcccttaacttcgaaaagtcact

SEQ ID NO: 186 - RNA, 977 nt, synthetic construct
  source 1..977: mol_type = other RNA
caccccctttggacgcggggcctgcgatagtgccaccccccgtcctccctattccaactacccgaccctaacccagggtccaggaaactggatcaatacaagtcatcccctgaatgctggctaatcagaggaaagtcagcattttccggcccaggctaagagaaacacaataagttagaatctaaattaatccccttgacgaattcgcaacgataagtcctccctcccttgccgctcgttcacacccagaactaacaattcggccccttgtgacgagccccttggtgaaaggacctctttcaatgcgacgtggttggagattaaaccgactccgacgaaagtgctatcatgcctccccgattatgtgatgttttctgccctgctgggcggagcattctcgggttgatacaccttgaatccttcatccttggacctcaggtcccccggtctaagccgcttggaatacgacagggttattttccaatcttctcctttctactttcatgagtcctattcatgaaaagggtctgtgctgccccttccttcttggagaatctgcgcggcggtctttccgtctctcgaaaagcgcagatgcagcatgctggaaccggtgaagaaaacagttctttgtggaaacttagagcagacatcgaaacagctgtagtgacctcacagtagcagcggaaccccctcctggtaacaggagcctctgcggccaaaagccccgtggataagatccactgctgtgagcggtgcaaccccagcaccctggttcgatggttgttctctgtggaaccagagaatggtctttctcaagccctccagtagagaagccaagaatgtcctgaaggtaccccgcatgcgggatctgatcaggagaccaatcgtcagtgctttacactggcgctttggtttaaaaactgtcacagcttctccaaaccaagtggtcttggttttcacttttatcaaactgtttc

SEQ ID NO: 187 - RNA, 551 nt, synthetic construct
  source 1..551: mol_type = other RNA
aaatactggtcgaaaccgcttgggataagaccggggtttgttaatgtctcaatgttattctccacccaattgacgtcttttgtcaattggagggcagtgaaaccttgcccttgcttcttgcagaggattcccagtggtctttccgctctcgacaagggaattcatgatccaccaaaagttgtgaagagagcaggtcccatggaagctttctgacgactgatgatgactgtagcgaccctttgcaggcagcggacccccccacctggtgacaggtgcctctgcggccaaaagccacgtgtttaacagacacctgcaaaggcggcacaaccccagtgcctcatcaaaagtctgatgactgtggaaatagtcaaccggcttttcttaagcaaatttggtgtcggggctgaaggatgcccggaaggtaccacactggttgtgatctgatccggggccacagtacatgtgctttacacatgtagctgcggttaaaaaacgtctaggccccccgaaccacggggacgtggttttcctttgaaaaccacgattacaat

SEQ ID NO: 188 - RNA, 708 nt, synthetic construct
  source 1..708: mol_type = other RNA
ttgaaagccgggggtgggagatccggattgccagtctgctcgatatcgcaggctgggtccgtgactacccactccccctttcaacgtgaaggctacgatagtgccagggcgggtactgccgtaagtgccaccccaaaacaacaacaaaccccccctaacattactggccgacgccgcttggaataaggccggtgtgcgtttgtctatatgttatttcccaccacattgccgtcttttggcaatgtgtgggcccggaaacctggccctgtcttcttgacgagcattcctaggggtctttcccctctcgccaaaggaatgcaaggtctgttgaatgtcgtgaaggaagcagttcctctggaagcttcttgaagacaaacaacgtctgtagcggccctttgcaggcagcggaaccccccacctggcgacaggtgcctctgcggccaaaagccacgtgtataagatacacctgcaaaggcggcacaaccccagtgccacgttgtgagttggatagttgtggaaagagtcaaatggctctcctcaagcgtattcaacaaggggctgaaggatgcccagaaggtaccccattgtatgggatctgatctggggcctcggtgcacatgctttacatgtgtttagtcgaggttaaaaaacgtctaggccccccgaaccacggggacgtggttttcctttgaaaaacacgatgataat

SEQ ID NO: 189 - RNA, 544 nt, synthetic construct
  source 1..544: mol_type = other RNA
atgtggtcgaagccacttggaataagaccggcgtgcgcttgtctatatgttacttccaccacattgccgtcttttggcaatgtgagggcccggaacctggccctgtcttcttgacgaacattcctaggggactttcccctctcgccaaaggaatgtaaggtctgttgaatgtcgtgaaggaagcagttcctctggaagcttcttgaagacaaacagcgtctgtagcgaccctttgcaggcagcggaaccccccacctggtaacaggtgcctctgcggccgaaagccacgtgtataagatacacctgcaaaggcggcacaaccccagtgccacgttgtgcgttggatagttgtggaaagagtcaaatggctttccccaagcgtattcaacaaggggctgaaggatgcccagaaggtaccccactggttgggatctgatctggggcctcggtgcaggtgctttacacctgttgagtcgaggttaaaaaacgtctaggccccccgaaccacggggacgtggttttcctagaaaaccactatgacaat

SEQ ID NO: 190 - RNA, 818 nt, synthetic construct
  source 1..818: mol_type = other RNA
ctctctctttgaccctggctactggggttcagtagcatctttctttttcttactatactttactttcgacttctttctttacttattctttacttttctatcttcttttatatcttaactttacttattcaaacttttctatttctttctttattttcttatgtaactcttctttttaagttttattttgcctacttgtgagcttatgcgggaccactgtcttagacaaccccacatttgtcatgagtaagtacacgcaaccattacgattactttttaaccgtctgaccttttgataacaactgaagttaggcgtgaaacatgcatttataccaaagtagccccgcatttccccactacggtgggggggctaccctactggctttggaactgtagccattatgtgttgcctggctttcaggatctcacaacacaacagttctctcacaatggaatatgggtgagattgcagtgacatgaacaagtatctagtagtacatagactcaagcctagttgcctgcggaacaacatgtggtaacacatgccccagggtccaaaagacaagggttaacagccccttctaggtgtctgtgtgtgaagaatactttagtagtgttgttatgatctcacctgttagtacagaatgagtatggcttggtgaaggatgtcctacaggtacccattatatggatctgagtaggagaccactagtggtggctttaccgccaggtgagtggtttaaaaagcgtctagccaagccaacagcactagggatagtgctttctatattttatattttcagtgtatatggtgacaa

SEQ ID NO: 191 - RNA, 664 nt, synthetic construct
  source 1..664: mol_type = other RNA
cccctttacgtaactgcaacttaaagagtaccctactgcattggatgtgtggtaaacttttacgcacacatttgtagtagtgttagttatgttctacctaatgagtatgcatgcacccgtcgaaacacgcttgtgataagataggtgagtccatgtgactaatctcattaagataaataagcaccctacaacgcacggcacgctcgtgtcttccgtgcggggccgggacaacagcggcctaaatcttctaggtgaccaccatgcttttgggactatggcaccactgtggacgtgagtacctggcagtaagtctgtgaaaagatggaaggtgtcccaagctatggggcgtatgcatatagcctgcggaacaaacaacggcgacgttgtccccagggcccaaaaggcacgtggataagatccacctatatgtttaccccatagtgtaagtcactggaagtcctagtaatggatgtctggagtaaggctcacggggtagggcgaaggatgcccagaaggtacccgtaggtaaccttaagagactatggatctgatctggggaccggatggcgccatcaccatgacgtggaggccggtttaaaaaacgtctaagcccgaccaacaacctaggggactaggttttccttttttattcatgtatgacgtt

SEQ ID NO: 192 - RNA, 718 nt, synthetic construct
  source 1..718: mol_type = other RNA
tttcgaccgccttatggcaggcgggcttgtggacggcttcggcccacccacagcaagaatgccatcatctgtcctcacccccatttctcccctccttcccctgcaaccattacgcttactcgcatgtgcattgagtggtgcacgtgttgaacaaacagctacactcacgtgggggcgggttttcccgcccttcggcctctcgcgaggcccacccttccccttcctcccataactacagtgctttggtaggtaagcatcctgatcccccgcggaagctgctcgcgtggcaactgtggggacccagacaggttatcaaaggcacccggtctttccgcctccaggagtatccctgctagtgaattctagtggggctctgcttggtgccaacctcccccaaatgcgcgctgcgggagtgctcttccccaactcaccctagtatcctctcatgtgtgtgcttggtcagcatatctgagacgatgttccgctgtcccagaccagtccagcaatggacgggccagtgtgcgtagtcgtcttccggcttgtccggcgcatgtttggtgaaccggtggggtaaggttggtgtgcccaacgcccgtactttggtgacaactcaagaccacccaggaatgccagggaggtaccccgcctcacggcgggatctgaccctgggctaattgtctacggtggttcttcttgcttccatttctttcttctgttc

SEQ ID NO: 193 - RNA, 742 nt, synthetic construct
  source 1..742: mol_type = other RNA
ttaaaacagcctgtgggttgtacccacccacagggcccactgggcgctagcacactggtattacggtacctttgtgcgcctgttttataccccccccaacctcgaaacttagaagtaaagcaaacccgatcaatagcaggtgcggcgcaccagtcgcatcttgatcaagcacttctgtaaccccggaccgagtatcaatagactgctcacgcggttgaaggagaaaacgttcgttacccggctaactacttcgagaaacccagtagcatcatgaaagttgcagagtgtttcgctcagcactacccccgtgtagatcaggccgatgagtcaccgcacttccccacgggcgaccgtggcggtggctgcgttggcggcctgcctatggggcaacccataggacgctctaatacggacatggtgcgaagagtctattgagctagttagtagtcctccggcccctgaatgcggctaatcctaactgcggagcacatacccttaatccaaagggcagtgtgtcgtaacgggtaactctgcagcggaaccgactactttgggtgtccgtgtttccttttaatttttactggctgcttatggtgacaattgaggaattgttgccatatagctattggattggccatccggtgactaacagagctattgtgttccaatttgttggatttaccccgctcacactcacagtcgtaagaacccttcattacgtgttatttctcaactcaagaaa

SEQ ID NO: 194 - RNA, 712 nt, synthetic construct
  source 1..712: mol_type = other RNA
tcaccctcttttccggtggtctggtcccggaccaccgttactccattcagcttcttcggaacctgttcggaggaattaaacgggcacccatacacccccatcccctttctgcaacttaagtatgtgtgctcgtgatcttgactcccacggaatggatcgatccgctggagaacaaactgctagatccacatcctcccttcccctgggaggaccttggtcctcccacatcctccccccagcctgacgtaccacaggctgtgtgaagcccccgcgaaagctgctcacgtggcaattgtgggtccccccttcatcaagacaccaggtctttcctccttaaggctagccccgatgtgtgaattcacattgggcaactagtggtgtcactgtgcgctcccaatctcggccgcggagtgctgttccccaagccaaacccctggcccttcactatgtgcctggcaagcatacctgagaaggtgttccgctgtggctgccagcctggtaacaggtgccccagtgtgcgtaaccttcttccgtcttcggacggtagtgattggttaagatttggtgtaaggtccatgtgccaacgccctgtgcgggatgaaacctctactgccctaggaatgccaggcaggtaccccacccccgggtgggatctgagcctgggctaattgtctacgggtagtttcatttccaattcttttatgtcggagtc

SEQ ID NO: 195 - RNA, 712 nt, synthetic construct
  source 1..712: mol_type = other RNA
tcaccctctttcccggtggtctggtcccggaccaccgttactccattcagcttcttcggaacctgttcggaggaattaaacgggcacccatacatccccatcccctttctgtaacttaagtatgtgtgcttgtaatcttgactcccacggaatggatcgatccgctggagaacaaactgctagatccacatcctcccttcccctgggaggaccttggtcctcccacatcctccccccagcctgacgtaccacaggctgtgtgaagcccccgcgaaagctgctcacgtggcaattgtgggtccccccttcatcaagacaccaggtctttcctccttaaggctagccccgatgtgtgaattcacattgggcaactagtggtgtcactgtgcgctcccaatctcggccgcggagtgctgttccccaagccaaacccctggcccttcactatgtgcctggcaagcatatctgagaaggtgttccgctgtggctgccagcctggtaacaggtgccccagtgtgcgtaaccttcttccgtctccggacggtagtgattggttaagatttggtgtaaggttcatgtgccaacgccctgtgcgggatgaaatctctactgccctaggaatgccaggcaggtaccccaccctcgggtgggatctgagcctgggctaattgtctacgggtagtttcatttccaatccttttatgtcggagtc

SEQ ID NO: 196 - RNA, 727 nt, synthetic construct
  source 1..727: mol_type = other RNA
ggcttcggccccctcaccctcttttccggtggtctggtcccggaccaccgttactccattcagcttcttcggaacctgttcggaggaattaaacgggcacccatacacccccatccccttttttgcaacttaagtatgtgtgctcgtaatcttgactcccacggaatggatcgatccgctggagaacaaactgctagatccacatcctccctcccccctgggaggacctcggtcctcccacatcctccccccagcctgacgtatcacaggctgtgtgaagcccccgcgaaagctgctcacgtggcaattgtgggtccccccttcatcaagacaccaggtctttcctccttaaggctagtcccgatgtgtgaattcacatcgggcaactagtggtgtcactgtgcgctcccaatctcggccgcggagtgctgttccccaagccaaacccctggcccttcactatgtgcctggcaagcatatctgagaaggcgttccgctgtggctgccagcctggtaacaggtgccccagtgtgcgtaaccttcttccgtccccggacggtagtgattggttaagacttggcgtaaggttcatgtgccaacgccctgtgcgggatgaaacctctactgccctaggaatgccaggcaggtaccccaccttcgggtgggatctgagcctgggctaattgtctacgggtagtttcatttctaattctttcatgtcggagtc

SEQ ID NO: 197 - RNA, 710 nt, synthetic construct
  source 1..710: mol_type = other RNA
accctcttttccggtggtctggtcccggaccaccgttactccattcagcttcttcggaacctgttcggaggaattaaacgggcacccatacacccccaccccctttttgcaacttaagtatgtgtgctcgtgatcttgactcccacggaatggatcgatccgctggagaacaaactgctagatccacatcctcccttcccttgggaggacctcggtcctcccacatcctccccccagcctgacgtaccacaggctgtgtgaagcccccgcgaaagccgctcacgtggcaattgtgggtccccccttcattaagacaccaggtctttcctccttaaggctagtcccgatgtgtgaattcacattgggcaactagtggtgtcactgtgcgctcccaatctcggccgcggagtgctgttccccaagccaaacccctggcccttcactatgtgcctggcaagcatatctgagaaggtgttccgctgtggctgccagcctggtaacaggtgccccagtgtgcgtaaccttcttccgtcttcggacggtagtgattggttaagatttggcgtaaggttcatgtgccaacgccctgtgcgggatgaaacctctactaccctaggaatgccaggcaggtaccccaccctcgggtgggatctgagcctgggctaattgtctacgggtagtttcatttccaattcttctatgtcggagtc

SEQ ID NO: 198 - RNA, 677 nt, synthetic construct
  source 1..677: mol_type = other RNA
gttactccattcagcttcttcggaacctgttcggaggaattaaacgggcacccatacacccccacccccttttctgcaacttaagtatgtgtgctcgtaatcttgactcccacggaatggatcgatccgctggagaacaaactgctagatccacatcctcccttcccctgggaggaccccggtcctcccacatcctccccccagcctgacgtatcacaggctgtgtgaagtccccgcgaaagctgctcacgtggcaattgtgggtccccccttcatcaagacaccaggtctttcctccttaaggctagccccgatgtgtgaattcacattgggcaactagtggtgtcactgtgcgctcccaatctcggccgcggagtgctgttccccaagccaaacccctggcccttcactatgtgcctggcaagcatatctgagaaggtgttccgctgtggctgccagcctggtaacaggtgccccagtgtgcgtaaccttcttccgtctccggacggtagtgattggttaagatttggtgtaaggttcatgtgccaacgccctgtgcgggatgaaacctctactgccctaggaatgccaggcaggtaccccaccttcgggtgggatctgagcctgggctaattgtctacgggtagtttcatttccaattcttttatgtcggagtc

SEQ ID NO: 199 - RNA, 735 nt, synthetic construct
  source 1..735: mol_type = other RNA
gggtgggggggtgtcggccccctcaccctcttttccggtggtctggacccggaccaccgttactccattcagcttcttcggaacctgttcggaggaattaaacgggcacccactttcctgtcctctccccttttctgtaactccaagtgtgtgctcgtaatcttgactcccgcggattgaccgctccgctggtgaacaaactgctaggtcatctcctccccacccttgggcgtccttccgggcgtccacaccctccccccagcctgacgtgtcacaggctgtacaaagaccccgcgaaagctgctaacgtggcaattgtgggtcccccctttgtaaaggaaccgagtctttctcccttaaggctagacccctgtgtgaattcacaggtggcaactagtggttccactgcatgctcccgacctcggccgcggagtgctgttccccaagtcgtaacactgaccttcacttatgtgcctggcaagcatatctgagaagatgttccgctgtggctgccaaacctggtaacaggtgccccagtgtgcgtagtcttcttccgtcttcggacggtaggtgttaggtaaagatgcggcgtaaggttcaagtgccaacgccctggaagggatgacccttctactgccctaggaatgccgcgcaggtaccccaggttcgcctgggatctgagcgcgggctaattgtctacgggtagtttcatttccctcttcttccactggcatc

SEQ ID NO: 200 - RNA, 736 nt, synthetic construct
  source 1..736: mol_type = other RNA
gggtgggggggcctcggccccctcaccctcttttccggtggtctggacccggaccaccgttactccattcagcttcttcggaacctgttcggaggaattaaacgggcacccactttcctgtcctctccccctttctgcaactcaagtgtgtgctcgtaatcctgactcccacgggttgaccgccccgttggtgaacaaacagctaggtcattccctccctacccctgggcgccatttcagtggcgttcatatcctccccccagcctgacgtgtcacaggctgtgcaaagtccccgcgaaagctgctcacgtggcaattgtgggtcccccctttgtgaaggaaccgagtctttctcccttaaggctagacccctgtgtgaactcacaggtggcaactagtggttccactgcatgctcccgacctcggccgcggagtgctgttccccaagtcgtgacactgacctccacttatgtgcctggcaagcatatctgagaagatgttccgctgtggctgccaaacctggtaacaggtgccccagtgcgtgtagtcttcttccgtctccggacggtaagtgtgtggtaaagatgcggcgtaaggttcaagtgccaacgccctggaagggatgacccttctactgccctaggaatgccgcgcaggtaccccaggttcgcctgggatctgagcgcgggctaattgtctacgggtagtttcatttccctctcttttcactggcatc

SEQ ID NO: 201 - RNA, 576 nt, synthetic construct
  source 1..576: mol_type = other RNA
tttgaaaagggggtgggggggcctcggccccctcaccctcttttccggtggccattcgcccgggccaccgttactccactccactccttcgggactggtttggaggaacacaacagggcttcccatccctgtttaccctttattccatcatcctttccccaagtttaccctatccacaccccactgactgactcctttggattttgacctcagaatgcctatttgacctcccactcgcctctcccttttcggattgccggtggtgcctggcggaaaaagcacaagtgtgttgcaggctaccaaactcctacccgacaaaggtgcgtgtccgcgtgctgagtaatgggataggagatgcctacaacaggctcgcccatgagtagagcatggactgcggtgcatgtgacttcggtcaccacgggcatagcattgctcacccgtgaatcaagtcatcgagatttctctgacctctgaagtgcactgtggttgcgtggctgggaatccacgcttgaccatgtactgcttgatagagtcgcggctggccgactcatgggttaaagtcagttgacaagacac

SEQ ID NO: 202 - RNA, 766 nt, synthetic construct
  source 1..766: mol_type = other RNA
tttcacaccctcttttccggtggtccggacccagaccaccgttactccattcagctacttcggtacctgttcggaggaattaaacgggcaccctacccaagggttacatgggaccatattcctcctcccctgtaactttaagttttgtgcccgtattcttgactccaggcggatgttgtgtcgcccgtcctgtgaacaaacagctagacactttcctcccctccctctgggctgctccggcagtccactccctccccccagcgtaacatgccccgctggagtgatgcacctggaagtcgtggacgtgggttagtaacttcggtgaaaacccactataatgacaactggttgacccccacactcaaaggactcgagtctttctcccttaaggctagcccggccacatgaatttgcagctggcaactagtgagtccaccatgtcccgcaacctcggctgcggagtgctgttccccaagcgtatgccttccttctgtaagagtgcgcctggcaagcacatctgagaagtcgttccgctgcgtcgtgccaacctggcgacaggtgacccagtgtgcgtagacttcttccggattcgtccggctcttctctaggaaacatgcgtgtaaggttcatgtgccaaagccctgcgcgcggtgttcttctactgccctaggaatgtgccgcaggtacccctacttcggtagggatctgagcggtagctaattgtctacgggtagtttcatttccatcttctcttcaggtcgacatc

SEQ ID NO: 203 - RNA, 797 nt, synthetic construct
  source 1..797: mol_type = other RNA
tttgaaaagggggtgggggggcttcggccccctcaccctcttttccggcggcgcaagttcgcgtcgtcgtaagcctggacacccatgttcgcatcggtctccgggcaaatacaagaaccccagaccttctggtacttcttcgcctgggtcacaaaagcgaagaacctgcctctctaacgccagacgagcggcattaaacttgaacttctggcactctccactctcccttttccctgtccctttccccactgcgctctcaaggtcgcgcaatcctgggactagcccagttttaaaagttcctggcaccctttgcccctctaggcccttaaggtaggaactgaccttgtgctgtgatctcggtgcgggagtgctaccacgtagtcatcgtaagcctcgtttctggttctgccctggcaaggctacagagtaccgtgttccgctgtggatgccatccgggtaaccggacccccagtgtgtgtagcggtatgttcacggtccgccgtgttcaccagattcctgacctggctttgctagaaatggtgtgtgcccaatccctgtgaccagtatcaattacatcacctaggaatgctaggaaggtaccccagtcctgagctgggatctgatcctaggctaattgtctacggtgatgctccttttattttcttacaactgctattgactgtctgattgctgattctgctcttgtgctcttctgctctggctcattctcaagggttctctttgtccaagatcctttggttctctccttgttccacttgccactgccaacgcttgtc

SEQ ID NO: 204 - RNA, 150 nt, synthetic construct
  source 1..150: mol_type = other RNA
gacaggtgttttggagggcggatgacgatatctggctggccaccagggaataacggcaaatgtctgatcatacggttcacaagtctaccggcgatagtggttcaacaccatgtgtagcagggattcttgcgtatgtgaaggcgacagtgc

SEQ ID NO: 205 - RNA, 1451 nt, synthetic construct
  source 1..1451: mol_type = other RNA
gaaagggggtggtaggggccgtacggtcatgccgtgcggttccgccacccctagggggccacacggtcctgccgtgtggttcccgctggttgtacagtgacgcattgggggccgtacggtcctgccgtgcggtttcctttgcttgctgtgcaatcggggatgacaccccctttcaacgtgggtactacgaaagtgcccctcgctccgaggttaaaggagaacccccccttcttacccccactcagctcgcccttcagtgcgggcgctagcctttccacttgcagcttctgcttgtagatgcttgcaccgtgattggtgcgcttcttgctttagtcgcttgtgcttctatcgttctgacgattcagtttcctaacgccagtgtttcgacggcccaagggggtagttgcggttagtattcctaccgcaattatccctttccccgttcgtagctggtttggatcttggatctctctccttccttcccccgtcttcaatttagcttcgtgattgaagcatctcactgtctctagtatttatgtcggactgacgattgagtacgttcagattgtgtttgggaggcccaagggatcgatggacaacacttcgaaagagtcacttgtccaccgctcctttcccctaccctagcaactctggatttgctcacgtggagttcgaggtctgtactttaactctgacttgcttttcttaccttgctatcttgctgacgtggattggttgtagactgattcacgttctcgttagatgctgacgtggagtacgatcgctgtacattccactactgccaattagctcccccttcccgttgctcccctctataaggagagccttctcttgcaaaggtgaagccttcacccccggtcgaagccgcttggaataagacagggttattttctcctctcctcggcgcttgcctcttctaagctgaataggttctatctattcaggcggatggtctggtccgttccttcttggacagagtgtgtatctgggttttccggatctcgaccacacactcaccagagctcaggagtgattaagtcaaggcccgatctgcggcgaaaaggaaatgaagtattttgcagctgtagcgacctctcaaggccagcggatttccccacctggtgacaggtgcctctggggccaaaagccacgtgttaatagcacccttgagagcggtggtaccccaccaccctgcaaattatggatttgacttagtaactaaaagattgacttggcatacctcaacctgagcggcggctaaggatgccctgaaggtacccgtgttgaaatcgcttcggcgaccatggatctgatcaggggccctgcctggagtggttctatcccacacagcgtagggttaaaaaacgtctaaccgccccacaaagaccccggcagggatgccggtttcctttttaccaattcttgacact

SEQ ID NO: 206 - RNA, 248 nt, synthetic construct
  source 1..248: mol_type = other RNA
ttggatctgagcaggggccccctttgggttgctttacaactcaactgggggttaaaaaacgtctaacccgacacgccagagggatctggtttccttttatttcttttactcaccactggatgcagattgacgataaacgttgttgtttgtgactattgacttgatctgcttctacgggtttactttcactgttatacttcttgctttgtttggtgttcactgtactttgtctccttctacatttcaca

SEQ ID NO: 207 - RNA, 601 nt, synthetic construct
  source 1..601: mol_type = other RNA
tttaagtgttgtgcccaatctcttgactcctgctggaaccaccgaccagtagtgtccaaaatgccaggtggaaaatcctcccttcccctctgggcttcatgcccggcatcctccccccagcctgacgtgccacaggctgtgcaaagaccccgcgaaagctgccaaaagtggcaattgtgggtcccccctttgtcaaggcgtcgagtctttctcccttaaggctagtcctgtcagtgaactctgtcgggcaactagtgacgccactgcatgcctccgacctcggccgcggagtgctgccccccaagtcatgcccctgaccacaagttgtgctgtctggcaaacattgtctgtgagaatgttccgctgtggctgccaagcctggtaacaggctgccccagtgtgcgtaattctcatccagacttcggtctggcaacttgctgttaagacatggcgtaaggggcgtgtgccaacgccctggaacgagtgtccactctaataccccgaggaatgctacgcaggtacccctggctcgccagggatctgagcgtaggctaattgtctaagggtattttcatttcccaccctcttcttcttgttcata

SEQ ID NO: 208 - RNA, 725 nt, synthetic construct
  source 1..725: mol_type = other RNA
ttaaaatagcctgagggttgttcccacccacagggcccacgtggcgcagtactctggtatcacggtacctttgcacgcctattttataccccttccccatcgtaacttagaagcaacaaacaaactgcccaatagcagcacaacacccagttgtgttaggggcaagcacttctgtttccccggaagggtctgacggtatgctgtacccacggcagaagtatgacctaccgttaaccggccatgtacttcgagaagcctagtaccattatgaaggttgattgatgttacgctccccagcaaccccagctggtagttctggtcgatgagtctcggcattccccacgggcgaccgtggccgaggctgcgttggcggccagcctacaccatacggtgtaggacgtcaagatactgacatggtgtgaagagcctattgagctacgtggtagtcctccggcccctgaatgcggctaatcctaactccggagcatccgccagtaagcccactggaagggtgtcgtaatgcgaaagtctggagcggaaccgactactttgggtgtccgtgtttcctgttttacttattgtttggctgcttatggtgacaacttatagttatcatcataagctacttggtcttgccaaccggagaattatttggttatttgttggtttcataaacctacagtcgtattttcctgtcttattaattgttctcaaaattaacaaca

SEQ ID NO: 209 - RNA, 821 nt, synthetic construct
  source 1..821: mol_type = other RNA
ttaaaacagcctgggggttgttcccacccccggggcccacgtggcgccagtactctggcacgttagtgcccttgtacgcctgttttcccctccttaaacaaattaagattgccactactgaggggagtagtccgactccgctccagtaccgctgcaccagtgagctggtacgctagtaccttcgcacggagtagatggcatcccccaccccgtaacttagaagcaaagtacacatctggccaatagtggcgctgcatccagccgcgcaacggtcaagcacttctgtttccccggtccgcaagggtcgttatccgcccagtccactacggaaagcctactaaccattgaagctatcgagaggttgcgctcggccacgaccccggtggtagctctgagtgatggggctcgcaaacacccccgtggtaacacggatgcttgcccgcgcgtgcactcgggttcagcctattggttgttcacctcaacatagtgtaaatggccaagagcctactgtgctggattggttttcctccggagccgtgaatgctgctaatcccaacctccgagcgtgtgcgcacaatccagtgttgctacgtcgtaacgcgtaagttggaggcggaacagactactttcggtactccgtgtttcttttgttttattttgaattttatggtgacaattgctgagatttgcgaattagcgactctaccgctgaacattgccctgtactacctaatcgcatttcacaaaacctcagagataccaagctcttacattgatctgcttgttttcctgaatctcaaatataaattggaacaagcaaa

SEQ ID NO: 210 - RNA, 626 nt, synthetic construct
  source 1..626: mol_type = other RNA
ttaaaactgggtgtgggttgttcccacccacaccacccaatgggtgttgtactctgttattccggtaactttgtacgccagtttttccctcccctccccatccttttacgtaacttagaagttttaaatacaagaccaatagtaggcaactctccaggttgtctaaggtcaagcacttctgtttccccggttgatgttgatatgctccaacagggcaaaaacaacagataccgttatccgcaaagtgcctacacagagcttagtaggattctgaaagatctttggttggtcgttcagctgcatacccagcagtagaccttgcagatgaggctggacattccccactggtaacagtggtccagcctgcgtggctgcctgcgcacctctcatgaggtgtgaagccaaagatcggacagggtgtgaagagccgcgtgtgctcactttgagtcctccggcccctgaatgcggctaaccttaaacctgcagccatggctcataagccaatgagtttatggtcgtaacgagtaattgcgggatgggaccgactactttgggtgtccgtgtttcactttttcctttattaattgcttatggtgacaatatatatattgatatatattggcatc

SEQ ID NO: 211 - RNA, 955 nt, synthetic construct
  source 1..955: mol_type = other RNA
acctgcgacagtgccaacccacatctcttcccactattattattccggttcccgccttaggtccattgaaaagaccaaacatgtcatcccttggatgctggctaatcagaggaaagtcagcattttccggcccaggctaagagaaacatataagttagaaatgattctaatcccttgacgaattcggaacgagaagttctccctcccttgccgcttgttcacacccatcatttaattcggccctttgtgacaagcccctcggtgaaaggacctctctctttccgacgtggttggaattaacatcttttccgacgaaagtgctattatgcctccccgattgtgtgatgctttctgccctgctgggcggagcgtcctcgggttgagaaaccttgaatcttttcctttggagccttggctcccccggtctaagccgcttggaatatgacagggttattttccaaactctttatttctactttcatgggttctatccatgaaaagggtatgtgttgccccttccttctttggagaatctgcgcggcggtctttccgtctctcaacaggcgtggatgcaacatgccggaaacggtgaagaaaacagttttctgtggaaatttagagtggacatcgaaacagctgtagcgacctcacagtagcagcggattcccctcttggcgacaagagcctctgcggccaaaagccccgtggataagatccactgctgtgagcggtgcaaccccagcaccctggttcgatggccattctctatggaaccagaaaatggttttctcaagccctccggtagagaagccaagaatgtcctgaaggtaccccgcgcgcgggatctgatcaggagaccaattggcagtgctttacgctgccactttggtttaaaaactgtcacagcttctccaaaccaagtggtcttggttttccaattttgttgactgacaat

SEQ ID NO: 212 - RNA, 803 nt, synthetic construct
  source 1..803: mol_type = other RNA
ttgaaaagggtgtggggggggataccctccccctccacactcttttcgacggcgcgcctcggcaaggccgccgataccgcactgtgctacttcggtaccactctgcgggaatgacaatatgcccggtgtatagtttgcctgtttctcgcaccgttaccgctcgttcgggaatgtgaaactggcacccctcctctcccctaccaccctttctccttcgcccccattcataatttacaacgccgcacacagcggcggccgccaagggctagcctggcggttataaaaggaacctgggtctttccctcttcaagccaaaaggtaggttccctgtgtccctgaatgctcggtgaggaatgctgcaccgtaacgctttgtgaagtgtttgcaagttctggcccggcaagcctacagagtgctgtgatccgctgcggacgccatcctggtaacaggacccccagtgtgcgcaacagtatgttcagacttcggtttgttcacttgctttcatggaccattgcgcgaaagtgcgtgcgccatatccctgtacttcaggtgtgcttctctggaccctaggaatgctgcgaaggtaccccgtttcggcgggatctgatcgcaggctaattgtctatgggttcagtttcctttttctttactccacaattgactgcttaactgactctggatcttgtgcttccactgctctttctgctctcaaaacggcttcacttaccaactctcacctttcgaccaacaccatttacacactaacttttttcgactcttctgactcctggcttggtgaagac

SEQ ID NO: 213 - RNA, 869 nt, synthetic construct
  source 1..869: mol_type = other RNA
ctctctttgaccctggccactggggttcagtggcactacatctctctctcttctttatctatatcgtttctttactttactttactttactatatttcttactttactatatttcttactttacttatctatatatatctaatctttactatcttttctaactttattttcttatttcttatctttattcttttgtaactaataagcaagttttactgcctgcaaactgcttcaatgggaccaccgcttcggcgacccctttgttgagtttgtatgtttttaagtaatctttgcaaccatacgattattttagccgcctctctataatgatcttgttatagtgggacgtgaaacattggtttttctcacacacgtccggtcacccgggcgtgtgttcttccgtaagtcctatccacataccatcgtgggtaggccagcatgtttgcacaggctgtgacagtgtgggtgggctttccacctctcaacaacacactgaattgcaatgcactcacggaggaaatgacaatttggttatagttttgaactgtgctagtaatttctttcacattaagccatgttgcctgcggaatcacatgtggtaacacatgcctcagggcccaaaaggcacgggttagcagccccttcatggtgtgttagaagtgaaaacacatagtatgagctataatatctttgttgtcttctctgtagtgtaccccgccaaatgtaaggatgcccagcaggtacccattttatggatctgagctggggattgatagtgtatctataaatgcactgatcaatttaaaaagcgtctaagtttggcacaaacactggggacagtgtttttcctttattcttttatttgatta

SEQ ID NO: 214 - RNA, 443 nt, synthetic construct
  source 1..443: mol_type = other RNA
acactcatttcccccctccacccttaaggtggttgtatcccctacaccctaccctcccttccacataggacgaataaacggacttgagattaaggcaagtacataaggtatggtttttggatacacttaaatggcagtagcgtggcgagctatggaaaaatcgcaattgtcgatagccatgttagcgacgcgcttcggcgtgctcctttggtgattcggcgactggttacaggagagtagacagtgagctatgggcaaacccctacagtattacttaggggaatgtgcaattgagacttgacgagcgtctctttgagatgtggcgcatgctcttggcattaccatagtgagcttccaggttgggaaacctggactgggtctatactgcctgatagggtcgcggctggccgcctgtaactagtatagtcagttgaaaacccccc

SEQ ID NO: 215 - RNA, 809 nt, synthetic construct
  source 1..809: mol_type = other RNA
ttaaaacagcctgtgggttgttcccacccacagggcccactgggcgctagtacactggtatgccttacctcggtattacggtaccgatgtatatagtacctttgtacgcctgttttatatccctcccccacatgtaaccttagaagtttacacaaacaaagaccaataggagtccaacacccagttggattgcggtcaagcacttctgtttccccggacctagtagtgataggctgtacccacggccgaagatgaacccgtccgttatccggctacctacttcgggaagcctagtaacattctgaagtctctgaggcgtttcgctcagcacgaccccggtgtagatcgggctgatgggtctccgcataccccacgggcgaccgtggcggaggccgcgttggcggcccgcctatggcgaaagccataggacgcctcttagatgacagggtgtgaagagcctactgagctgggtagtagtcctccggcccctgaatgcggctaatcctaaccacggagcgtccaccagcaatccagctggcagggcgtcgtaacgggcaactctgtggcggaaccgactactttgggtgtccgtgtttccttttgatcctattttggctgcttatggtgacaacgataagttgttatcataaagctcttgggttggccacctggaaaaagttatcagtgtttgatattgttcggctctcacgcctaccaataagacaagccctatatttacttgttgcattttactcgtcagaagaaatcacagagtatcatttggatttgttactcacattaaggacaag

SEQ ID NO: 216 - RNA, 751 nt, synthetic construct
  source 1..751: mol_type = other RNA
ttgaaagaaactccgggtattaaccatacccggagttttggcagggtgttccaacctgtcctggccatgcatttatctacggatatttgcatgacccgctttctatcgccccaacaatcccctttgtaaccacaagctttactcaggctagcagcccgactagctgtttggaagaaaaggctagggcacacaccaacaacaccgaccccactggtcgaaggccgcttggcaataagactggtggaacagggtcgcctgtagttgtttggaacattctttctaatgactttgtcagcggtgctactcacaccgtaactcttctaccctatccccacgcttgtggaactaggaggggatgagtgattcaagtaagtactgtcagaatggtgaaaatgatctgattctgaaacgctatggatccatcgaaagatggggctacacgcctgcggaacaacacatggtaacatgtgccccaggggccgaaagccacggtgataggatcacccgtgtagtttgagatcatatcaatgttcatagtctagtaagatgatttgaaatctaactgagctgatggctaactgcttgtcttattgcggcctaaggatgtcctgcaggtacctttagataaccttaagagactattgatctgagcaggagccaaagtggtctttcccagctttggttaaaaaacgtctaagccgcggcagggggcgggaggccccctttcctcccaaaacttaatattgattgt

SEQ ID NO: 217 - RNA, 816 nt, synthetic construct
  source 1..816: mol_type = other RNA
tttaaacagtctgggggttgttcccacccctggggcccacgtggcgctagcactctggtacgctagtacctttgtacgcctgttttccccacccttaaataaattaagattaccactaccgaggggagtagtccgactccgctccggcacagccgcaccagtgcactggtacgctagtaccttttcacggggtagtcggtatccccccccgtaacttagaagcatgtaacaaaccgaccaataggtgcgcggcagccagctgcgttgcggtcaagcacttctgtctccccggtccgcaaggatcgttacccgcccactccactacgaggagcctagtaactggccaagtgattgcggagttgcgttcagccacaaccccagtggtagctctggaagatggggctcgcacatcccccgtggtaacacggttgcttgcccgcgtgtgcttccgggttcagtctccgactgttcacttcaacatcacgcaaccagccaagagccgattgtgctggagtggtcttcctccggggccgtgaatgctgctaatcctaacctccgagcgtgtgcgcacaatccagtgttgctacgtcgtaacgcgtaagttggaggcggaacagactactttcggcaccccgtgtttcctttattttattcttattttatggtgacaattgcagagatttgtgatattgcgactttaccgttaaacatagcactgcattacctggttgcattccacaaaacttcagagattcctagttcctacattgacctacttgtttatttgaatcttaaatacaaacttgagcaagtgaa

SEQ ID NO: 218 - RNA, 636 nt, synthetic construct
  source 1..636: mol_type = other RNA
cccctaggatccactggatgtcagtacactggtatcgtggtacctttgtacgcctgttttatacccccttccccgcaactttagaagcatcaaaagcaccgctcaatagtcaccacacccccagtgtggtttcgagcaagcacttctgttttcccggttgcgtcccatatgctgtgcaaacggcaaaaagggacaatatcgttacccgcttgtatactacgggaaacctagtaccaccattgattgtgttgagagttgcgctcatcacctttccccggtgtagctcaggccgatgaggctcagaatcccccacaggtgactgtgtctgagcctgcgttggcggcctgccctcgccttatggcgtgggacgcttgatacatgacatggtgcgaagagtctactgtgctatgcaagagtcctccggcccctgaatgtggctaatcctaaccactgatcccacgcacgcaaaccagtgtgtagtgggtcgtaacgcgcaagtcggtggcggaaccaactactttgggtgaccgtgtttcctttattacttattgaatgtttatggtgacaattgtttgattcagttgttgccattctctacattcatttacccagcatcaaaccaattgaactgttaca

SEQ ID NO: 219 - RNA, 421 nt, synthetic construct
  source 1..421: mol_type = other RNA
agtctggacatccctcaccggcgacggtggtccaggctgcgctggcggcctacctgtggtccaaagccacgggacgctacatgtgaacaaggtgtgaagagcctattgagctacaaaagagtcctccggcccctgaatgcggctaatcccaaccacggatcaagggtgcacaaaccagtgtacaccttgtcgtaacgcgcaagtctgtggcggaaccgactactttgggtgtccgtgtttcctttttaattttgatggctgcttatggtgacaatcatagattgttatcataaagctaattggattggccatccggtgagagtgaaatatattgtttacctccctgttgggtttactctaactaacttctccatttataaacttgtcatcacagttttaataattagaagtgcagtttaca

SEQ ID NO: 220 - RNA, 663 nt, synthetic construct
  source 1..663: mol_type = other RNA
tttaaaacagcctgggggttgttcccacccccagggcccactgggcgttagtactctggtatcgcggtaccttagtatgcctgttttatgtctcctttcccccgcaactttagaagtaatcaagttatggctcaacagtcgccacacccccagtgtggttccgagcaagcacttctgttccccggttgcgtcttatatgctgtgtgaacggcagaaagggacaatatcgttatccgctcaactactacgggaagcctagtaccaccatggattgacctgaaagttgcgttcagcgcacccccagcgcagctcaggccgatgaggctccgaataccccacgggcgaccgtgtcggagcctgcgttggcggcctgcccacgttgcaaaacgtgggacgctcatttcatgacatggtgcgaagagcctactgtgctagttgagagtcctccggcccctgaatgtggataatcctaaccactgaacctacgggcgcaaaccagcgtctggtaggccgtaacgcgcaagtcggtggcggaaccaactactttgggtgtccgtgtttccttttatctttttgaatgtttatggtgacaattgttgtgtacagttgttaccatagtttgcattcagaaataaacctaacactttccaattatttgttaca

SEQ ID NO: 221 - RNA, 747 nt, synthetic construct
  source 1..747: mol_type = other RNA
ttaaaacagctctggggttgtacccaccccagaggcccacgtggcggctagcactccggtatcacggtacccttgtgcgcctgttttatattccccccccgcaacttagaagcacgaaaccaagttcaatagaagggggtacaaaccagtaccaccacgaacaagcacttctgtttccccggtgacattgcatagactgctcacgcggttgaaagtgatcgatccgttacccgcttgtgtacttcgaaaagcctagtattgccttggaatcttcgacgcgttgcgctcagcacccgaccccggggtgtagcttaggctgatgagtctggacattcctcaccggtgacggtggtccaggctgcgttggcggcctacctatggctaatgccataggacgctagatgtgaacaaggtgtgaagagcctattgagctacataagagtcctccggcccctgaatgcggctaatcctaaccacggagcaggcggtcgcaaaccagtgactagcttgtcgtaacgcgcaagtctgtggcggaaccgactactttgggtgtccgtgtttcctgttatttttattatggctgcttatggtgacaatcagagattgttatcataaagcgaattggattggccatccggtgagtgttgtgtcaggtatacaactgtttgttggaaccactgtgttagtttaacctctctttcaaccaattagtcaaaaacaatacgaagatagaacaacaatactaca

SEQ ID NO: 222 - RNA, 730 nt, synthetic construct
  source 1..730: mol_type = other RNA
ggggttgttcccaccccagaggcccacgtggcggctagtactccggtattacggtacccttgtacgcctgttttatactcccctccccgtaacttagaagaaacaaaataagttcaataggagggggtacaaaccagtaccaccacgaacaagcacttctgtctccccggtgacattgcatagactgtccccacggttgaaagcaattgatccgttacccgctcttgtacttcgagaagcctagtaccatcttggaatcatcgatgcgttgcgctccacactcagtcccagagtgtagcttaggctgatgagtctggacattcctcaccggcgacggtggtccaggctgcgttggcggcctacctgtggcccaaagccacaggacgctagatgtgaacaaggtgtgaagagcctattgagctataagagagtcctccggcccctgaatgcggctaatcccaaccacggatcaagggtgcacgaaccagtgtataccttgtcgtaacgcgcaagtccgtggcggaaccgactactttgggtgaccgtgtttccttttattatttcaatggctgcttatggtgacaatcattgattgttatcataaagcgaattggactggccatccggtgaaagtgaaacatattgtttgcctcctcgttgggtctacttcaaccaatctttacttacaatcttaccactacagttttgctggttagaagtgtgtttcacg

SEQ ID NO: 223 - RNA, 736 nt, synthetic construct
  source 1..736: mol_type = other RNA
ctggggttgtacccaccccagaggcccacgtggcggctagcactccggtattacggtacccttgtgcgcctgttttatactcccctcccgcaacttagaagcacgaaaccaagttcaatagaagggggtacaaaccagtaccactacgaacaagcacttctgtttccccggtgacattgcatagactgctcacgcggttgaaagtgatcgatccgttacccgcttgtgtacttcgaaaagcctagtatcgccttggaatcttcgacgcgttgcgctcagcacccgaccccggggtgtagcttaggccgatgagtctggacattcctcaccggtgacggtggtccaggctgcgttggcggcctacctatggctaacgccataggacgttagatgtgaacaaggtgtgaagagcctattgagctacataagagtcctccggcccctgaatgcggctaatcctaaccacggagcaggcggtcgcgaaccagtgactggcttgtcgtaacgcgcaagtctgtggcggaaccgactactttgggtgtccgtgtttcctgttatttttatcatggctgcttatggtgacaatcagagattgttatcataaagcgaattggattggccatccggtgagtgttgtgtcaggtatacaactgtttgttggaaccactgtgttagctttgcttctcatttaaccaattaatcaaaaacaatacgaggataaaacaacaatactaca

SEQ ID NO: 224 - RNA, 743 nt, synthetic construct
  source 1..743: mol_type = other RNA
ttaaaacagcctgtgggttgtacccacccacagggcccactgggcgctagcactctggtatcacggtacctttgtgcgcctgttttatgcccccttcccccaattgaaacttagaagttacacacaccgatcaacagcgggcgtggcataccagccgcgtcttgatcaagcactcctgtttccccggaccgagtatcaatagactgctcacgcggttgaaggagaaaacgttcgttacccggctaactacttcgagaaacctagtagcatcatgaaagttgcgaagcgtttcgctcagcacatccccagtgtagatcaggtcgatgagtcaccgcattccccacgggcgaccgtggcggtggctgcgttggcggcctgcctacggggcaacccgtaggacgcttcaatacagacatggtgcgaagagtcgattgagctagttagtagtcctccggcccctgaatccggctaatcctaactgcggagcacataccctcaacccagggggcattgtgtcgtaacgggtaactctgcagcggaaccgactactttgggtgtccgtgtttccttttattcttataatggctgcttatggtgacaattgaaagattgttaccatatagctattggattggccatccggtgtctaacagagctattatatacctctttgttggatttgtaccacttgatctaaaggaagtcaagacactacaattcatcatacaattgaacacagcaaa

SEQ ID NO: 225 - RNA, 735 nt, synthetic construct
  source 1..735: mol_type = other RNA
ctgtgggttgttcccacccacagggcccactgggcgccagcactctgattccacggaatctttgtgcgcctgttttacaacccttccccaacttgtaacgtagaagtaatacacactactgatcaatagcaggcatggcgcgccagtcatgtctcgatcaagcacttctgttcccccggactgagtatcaatagactgctcacgcggttgaaggagaaaacgttcgttacccggctaactacttcgagaaacctagtagcaccatagaagctgcagagtgtttcgctcagcacttcccccgtgtagatcaggctgatgagtcactgcaatccccacgggtgaccgtggcagtggctgcgttggcggcctgcctatggggcaacccataggacgctctaatgtggacatggtgcgaagagtctattgagctagttagtagtcctccggcccctgaatgcggctaatcctaactgcggagcacatgccttcaacccagaaggtagtgtgtcgtaacgggcaactctgcagcggaaccgactactttgggtgtccgtgtttctttttattcctatattggctgcttatggtgacaatcacggaattgttgccatatagctattggattggccatccggtgtctaatagagctattgtgtacctatttgttggatttactccgctatcacataaatctctgaacactttgtgctttatattgaacttaaacacccgaaa

SEQ ID NO: 226 - RNA, 265 nt, synthetic construct
  source 1..265: mol_type = other RNA
attaaaggtttataccttcccaggtaacaaaccaaccaactttcgatctcttgtagatctgttctctaaacgaactttaaaatctgtgtggctgtcactcggctgcatgcttagtgcactcacgcagtataattaataactaattactgtcgttgacaggacacgagtaactcgtctatcttctgcaggctgcttacggtttcgtccgtgttgcagccgatcatcagcacatctaggtttcgtccgggtgtgaccgaaaggtaag

SEQ ID NO: 227 - RNA, 812 nt, synthetic construct
  source 1..812: mol_type = other RNA
ttaaaacagcctgggggttgtacccacccctggggcccacgcggcgccagtactctggtacgctagtacctttgtacgcctgttttccccacccttaaataaattaagattaccactgctgtggggagtagtccgactccgcaccgatacgtcgcaccagtgaactggttcgcttagaacctttgcacggagcagctggtatccccccccgtaacttagaagcctggacaaaccgaccaatagaggcgttgtagccagcagcgcaacggtcaagcacttctgtttccccggcgccatgcgtcgttacccgcccggcctactgcgggaagcctagtaggaccccaatcggacgcgcggttgcgttcagccacaaccccagtggtagctctgaggaatgggactcgcctaccccccacagcaatgtggtggcttgtccgcgtgtgtcctcgggttcgctcgttgagcgatcaccgcaactctgagtaaggtctcaagagcctactgcgctaggtcggttctcctccggagccgtgaatgctgctaatcccaacctccgagcgtgtgcgcacaacccagtgttgctacgtcgtaatgcgtaagttggaggcggaacagactactttcggtactccgtgtttccttaatttttgttcattattacatggtgacattgactgacatttgtgaatttgcccgcctgcccttgaacatagctctctattacttgattgcatttcacaaaacaacccaactcactgttgaacttgttgacttcgcagtctacttgaacttacagtacaatcacattcaca

SEQ ID NO: 228 - RNA, 460 nt, synthetic construct
  source 1..460: mol_type = other RNA
cttgtaaaaacaactttgatgccttgaatatataatgattcattataacaattatgcatagattttaataatctgcatattttatgctttcatgtttttcctaattaatgatttgacatggttaataattataatatattctgcatcacagtttacatatttatgtaaaataagcatttaaaaattattagttttattctgcctgcttaaatattactttcctcaaaaagagaaaacaaaaatgctagattttactttatgacttgaatgatgtggtaatgtcgaactctagtatttagaattagaatgtttcttagcggtcgtgtagttatttttatgtcataagtggataatttgttagctcctataacaaaagtctgttgcttgtgtttcacattttggatttcctaatataatgttctctttttagaaaaggtggacaagtcctattttcaagaga

SEQ ID NO: 229 - RNA, 708 nt, synthetic construct
  source 1..708: mol_type = other RNA
tttaataagtgttgtgcagattaatctgcacagcactagccacaaagttcagtggtcccaattatgggatataaaactcaatggtcgacggagtgacctggaaatgctccccgtgagaaaccttgtttaaacgcacttggaccttctccggcctcagcgccaggcatagctggatcgtcaatcccaagtttggacttagacttgctctatgttacaattgggaggagcgtgacttaccattggtcgttgatgacgttaattccaaacaaaaacaacaacaacaacttagtttaaataattccggtctttaagcatcagggtagaccgatgaggaataaagaaccctataagactgattcgataccaagagctggtgtctgagggattacgactcgcgtggtcggacagcacatgttagtcatgtattatggtgtttcccaacacgtatctttgctctagtattgaactttagtgatgagtgtacttggcatgtacacctgattagttagcccttgtggatacgccactgccgctcaggtacagtaggacataccccaaatattgggttccactcgtagagaagaaaattagtggcgaaacgtacggtttatgtcaaaggagaaggtgattttaattgcacctgaagcaaccctaggtcttccctttgatgtgagctaataaggagtaaccgattcttacaatgtgatc

SEQ ID NO: 230 - RNA, 2412 nt, synthetic construct
  source 1..2412: mol_type = other RNA
agcgcccaatacgcaaaccgcctctccccgcgcgttggccgattcattaatgcagctggcacgacaggtttcccgactggaaagcgggcagtgagcgcaacgcaattaatgtgagttagctcactcattaggcaccccaggctttacactttatgcttccggctcgtatgttgtgtggaattgtgagcggataacaatttcacacaggaaacagctatgaccatgattacgccaagcttccaggcactcctttcaagacctagaaggtccattagctgcaaagattcctctctgtttaaaactttatccatctttgcaaagctttttgcaaaagcctaggcctccaaaaaagcctcctcactacttctggaatagctcagaggccgaggcggcctcggcctctgcataaataaaaaaaattagtcagccatggggcggagaatgggcggaactgggcggagttaggggcgggatgggcggagttaggggcgggactatggttgctgactaattgagatgcatgctttgcatacttctgcctgctggggagcctggcgtgaggctccggtgcccgtcagtgggcagagcgcacatcgcccacagtccccgagaagttggggggaggggtcggcaattgaaccggtgcctagagaaggtggcgcggggtaaactgggaaagtgatgtcgtgtactggctccgcctttttcccgagggtgggggagaaccgtatataagtgcagtagtcgccgtgaacgttctttttcgcaacgggtttgccgccagaacacaggtaagtgccgtgtgtggttcccgcgggcctggcctctttacgggttatggcccttgcgtgccttgaattacttccacgcccctggctgcagtacgtgattcttgatcccgagcttcgggttggaagtgggtgggagagttcgaggccttgcgcttaaggagccccttcgcctcgtgcttgagttgaggcctggcctgggcgctggggccgccgcgtgcgaatctggtggcaccttcgcgcctgtctcgctgctttcgataagtctctagccatttaaaatttttgatgacctgctgcgacgctttttttctggcaagatagtcttgtaaatgcgggccaagatctgcacactggtatttcggtttttggggccgcgggcggcgacggggcccgtgcgtcccagcgcacatgttcggcgaggcggggcctgcgagcgcggccaccgagaatcggacgggggtagtctcaagctggccggcctgctctggtgcctggcctcgcgccgccgtgtatcgccccgccctgggcggcaaggctggcccggtcggcaccagttgcgtgagcggaaagatggccgcttcccggccctgctgcagggagctcaaaatggaggacgcggcgctcgggagagcgggcgggtgagtcacccacacaaaggaaaagggcctttccgtcctcagccgtcgcttcatgtgactccacggagtaccgggcgccgtccaggcacctcgattagttctcgagcttttggagtacgtcgtctttaggttggggggaggggttttatgcgatggagtttccccacactgagtgggtggagactgaagttaggccagcttggcacttgatgtaattctccttggaatttgccctttttgagtttggatcttggttcattctcaagcctcagacagtggttcaaagtttttttcttccatttcaggtgtcgtgaggaattctctaggtcgaccccggggatcctctagactagtgctagcatgctgcagtcgaaggtaccgcgggcccgggatccgcccctctccctcccccccccctaacgttactggccgaagccgcttggaataaggccggtgtgcgtttgtctatatgttattttccaccatattgccgtcttttggcaatgtgagggcccggaaacctggccctgtcttcttgacgagcattcctaggggtctttcccctctcgccaaaggaatgcaaggtctgttgaatgtcgtgaaggaagcagttcctctggaagcttcttgaagacaaacaacgtctgtagcgaccctttgcaggcagcggaaccccccacctggcgacaggtgcctctgcggccaaaagccacgtgtataagatacacctgcaaaggcggcacaaccccagtgccacgttgtgagttggatagttgtggaaagagtcaaatggctctcctcaagcgtattcaacaaggggctgaaggatgcccagaaggtaccccattgtatgggatctgatctggggcctcggtacacatgctttacatgtgtttagtcgaggttaaaaaaacgtctaggccccccgaaccacggggacgtggttttcctttgaaaaacacgatgataatatggccacaacc

SEQ ID NO: 231 - RNA, 742 nt, synthetic construct
  source 1..742: mol_type = other RNA
ttaaaacagcctgtgggttgcacccactcacagggcccactgggcgcaagcactctggtacctcggtacctttgtgcgcctgttttacaccccccccccagtgaaacttagaagcagcaaaccacgatcaatagcgggcataacgctccagttatgtcttgatcaagcacttctgtttccccggactgagtatcaatagactgctcgcgcggttgaaggagaaaacgttcgttatccggctagctacttcgggaaacctagtaacaccatgaaagttgcggagagcttcgttcagcactcccccagtgtagatcaggtcgatgagtcaccgcattccccacgggcgaccgtggcggtggctgcgttggcggcctgcccatggggtaacccatggggcgctctaatacggacatggtgtgaagagtctactgagctagttagtagtcctccggcccctgaatgcggctaatcccaactgcggagcacacgcccacaagccagcgggtagcgtgtcgtaacgggtaactctgcagcggaaccgactactttgggtgtccgtgtttctttttatctttatactggctgcttatggtgacaattaaagaattgttaccatatagctattggattggccatccggtgtgcaacagagcaattgtttacctattcattggtttcgtaccattaaccttgaagtctgtgaccacccttaactacatcttgacccttaacacagctaaac

SEQ ID NO: 232 - RNA, 1078 nt, synthetic construct
  source 1..1078: mol_type = other RNA
gacggatcgggagatcttcaatattggccattagccatattattcattggttatatagcataaatcaatattggctattggccattgcatacgttgtatctatatcataatatgtacatttatattggctcatgtccaatatgaccgccatgttggcattgattattgactagttattaatagtaatcaattacggggtcattagttcatagcccatatatggagttccgcgttacataacttacggtaaatggcccgcctggctgaccgcccaacgacccccgcccattgacgtcaataatgacgtatgttcccatagtaacgccaatagggactttccattgacgtcaatgggtggagtatttacggtaaactgcccacttggcagtacatcaagtgtatcatatgccaagtccgccccctattgacgtcaatgacggtaaatggcccgcctggcattatgcccagtacatgaccttacgggactttcctacttggcagtacatctacgtattagtcatcgctattaccatggtgatgcggttttggcagtacaccaatgggcgtggatagcggtttgactcacggggatttccaagtctccaccccattgacgtcaatgggagtttgttttggcaccaaaatcaacgggactttccaaaatgtcgtaataaccccgccccgttgacgcaaatgggcggtaggcgtgtacggtgggaggtctatataagcagagctcgtttagtgaaccgtcagatcactagaagctttattgcggtagtttatcacagttaaattgctaacgcagtcagtgcttctgacacaacagtctcgaacttaagctgcagaagttggtcgtgaggcactgggcaggtaagtatcaaggttacaagacaggtttaaggagaccaatagaaactgggcttgtcgagacagagaagactcttgcgtttctgataggcacctattggtcttactgacatccactttgcctttctctccacaggtgtccactcccagttcaattacagctcttaaggctagagtacttaatacgactcactataggctagccacc

SEQ ID NO: 233 - RNA, 584 nt, synthetic construct
  source 1..584: mol_type = other RNA
tactctggtattatgtacctttgtacgcctgtttcttccctacaaccccttcctaaaactcccacccatgaaacgttagaagcttgacatttaagtacaataggtggcaccacatccagtggtgtctacgtacaagcacttctgtttccccggagcgaggtataggctgtacccactgccaaaagcctttaaccgttatccgccaaccaactacgtaacagctagtatcatcttgttcttcactggacgttcgatcaggtggattccccctccactagtttggtcgatgaggctaggagctccccacgggtgaccgtgtcctagcctgcgtggcggccaacccagctcatgctgggacgcccttttaaggacatggtgtgaagactcgcatgtgcttggttgtgagtcctccggcccctgaatgcggctaaccttaaccctggagccttatgccacgaaccagtggttgtaaggtcgtaacgagcaattccgggatgggaccgactactttgggtgtccgtgtttcctatttttctttatattgtcttatggtcacagcatatatataagtatatactgtgatc

SEQ ID NO: 234 - RNA, 747 nt, synthetic construct
  source 1..747: mol_type = other RNA
ttaaaacagctctggggttgttcccaccccagaggcccacgtggcggccagtacactggtatcgcggtacctttgtacgcctgttttatactcccttcccccgtaacttagaagcacaacgtccaagttcaatagaagggggtacaaaccagtaccaccacgaacaagcacttctgttcccccggtgaggctgtataggctgtttccacggctaaaagcggctgatccgttatccgctcatgtacttcgagaagcctagtatcaccttggaatcttcgatgcgttgcgctcaacactcaaccccagagtgtagcttaggtcgatgagtctggacgttcctcaccggcgacggtggtccaggctgcgttggcggcctacctgtggcccaaagccacaggacgctagttgtgaacaaggtgtgaagagcctattgagctacctgagagtcctccggcccctgaatgcggctaatcctaaccacggagcaggcagtggcaatccagcgaccagcctgtcgtaacgcgcaagttcgtggcggaaccgactactttgggtgtccgtgtttccttttatttttacaatggctgcttatggtgacaattattgatagttatcataaagcaaattggattggccatccggtgagaatttgattattaaattactctcttgttgggattgctcctttgaaatcctgtgcactcacacctattggaattacctcattgttgagatattattaccact

SEQ ID NO: 235 - RNA, 747 nt, synthetic construct
  source 1..747: mol_type = other RNA
ttaaaacagctctggggttgctcccaccccagaggcccacgtggcggccagtactctggtattgcggtacctttgtacgcctgttttatactccctccccccgtgcaactttagaagaaatccacaaagttcaatagagggggtgcaaaccagcaccaccacgaacaagcacttctgtttccccggtgatgtcgtataagctgtacccacggctgaaggcgacggatccgttatccgcttgagtacttcgagaagcctagtattaccttggaatcttcgacgcgttgcgctcagcactctaccccgagtgtagcttaggtcgatgagtctgggcacgccccaccggcgacggtggcccaggctgcgttggcggcctacccatggctatcaccatgggacgctagttgtgaacaaggtgtgaagagcctattgagctacccaagagtcctccggcccctgaatgcggctaatcctaaccacggagcaagtgtcctcaacccaggggatggcttgtcgtaacgcgaaagtctgtggcggaaccgactactttgggtgtccgtgtttccttttatttttatgtatggctgcttatggtgacaatcaaaggttgttaccataaagcaatttggattggccatccggtgagaatcaaacatattatctacctgtttgttgggttttcttcttttacttgaacaatacctctaataataactgctatattgtcaataagacattatcatcaca

SEQ ID NO: 236 - RNA, 653 nt, synthetic construct
  source 1..653: mol_type = other RNA
gagtgttcccacccaacaggcccactgggtgttgtactctggtattacggtacctttgtacgcctattttatttcccccccctttttgaaacttagaagttaataataaacacgctcactaggtgcactacatccagtagtgtaatgagcaagcacttctgtctgccccgggagggatatatggtacgctgtgcaaacggcggaaattaatcctaccgttaaccgcccacctactccgagaagcctagtacctaattggatttatcaatggagttgcgctcagcaggtgaccctgacctgccagctccggctgatggacctgggctttccccacaggcgactgtggcccaggtcgcgtggcggccggcccacccccctgggtgggacgccttgataatgacaaggtgggaagagcctattgggctagctggtttcctccggcctcctgaatgcggctaaccttaaccccagagcatatggtagcaacccagctactagtatgtcataatgcgtaagtctgggatgggaccgactactttggagagtccgtgtttctattgtttctttaatcaatcttatggtgacaatttatagtgccctgagtattgattggttgttgcttttgacaattattgagacatcacatagacata

SEQ ID NO: 237 - RNA, 666 nt, synthetic construct
  source 1..666: mol_type = other RNA
ttaaaatagctgctgggttgttcccatccagcaggcccactgggcgtgatactctggtattgcggtacctttgtatgcctattttacctcccttccccctgaaacttagaagaaagaaacaaacacgctcactaggtacactgcatccagcagtgtaatgagcaagcacttctgtttccccggaagggatatatggtacgctgtgcaaacggcggaaattaatcctaccgttaaccgcccatctactccgagaagcctagtacctaattgaacttatcaatggagttgcgctcagcaggtgaccctgacctgccagctccggctgatggacctgggcatcccccacaggcgactgtggcccaggtcgcgtggcggccggcccactcttttgagtgggacgccttgataatgacaaggtgggaagagcctattgggctagctggtttcctccggcctcctgaatgcggctaaccctaaccccggagcatatggtggcaacccagccactggtatgtcgtaacgcgtaagtctgggatgggaccgactactttggagagtccgtgtttccattattttctttattgaatcttatggtgacaaattgggagttactcgggtgacgattgattattacttctgaaaacgtagagatatagaatcaacaca

SEQ ID NO: 238 - RNA, 743 nt, synthetic construct
  source 1..743: mol_type = other RNA
ttaaaacagcctgtgggttgttcccacccacagggcccactgggcgctagcacactggtatcacggtacctttgtgcgcctgtttgacttaccctccccaaacgcaacttagaagcacaacttaaatggtcaataggcggctcagtatgccaactgagtctcgatcaagcacttctgttaccccggactgagtaccaataggctgctcacgcggctgaaggggaaaccgttcgttacccgactaactacttcgagaaacctagtaccaccatgaaagttgcgcagcgtttcgctccgcacaaccccagtgtagatcaggtcgatgagtcaccgcaaaccccacgggcgaccgtggcggtggctgcgctggcggcctgcccatggggcaactcatgggacgcttcaatactgacatggtgcgaagagtctattgagctagttggtagtcctccggcccctgaatgcggctaatcctaactgcggagcagatacccacgcaccagtgggcagtctgtcgtaatgggcaactctgcagcggaaccgactactttgggtgtccgtgtttccttttgttcttatactggctacttatggtgacaattgagagattgtaaccatattgctattggattggccacccggcgacgaatagaacagttgcttacctgtttgttagtctcgtatcactgaactacaaatccttaaacaccctttaatttcgtcataacgctcaatacgttaaa

SEQ ID NO: 239 - RNA, 573 nt, synthetic construct
  source 1..573: mol_type = other RNA
cccctctccctcccccccccctaacgttactggccgaagccgcttggaataaggccggtgtgcgtttgtctatatgttattttccaccatattgccgtcttttggcaatgtgagggcccggaaacctggccctgtcttcttgacgagcattcctaggggtctttcccctctcgccaaaggaatgcaaggtctgttgaatgtcgtgaaggaagcagttcctctggaagcttcttgaagacaaacaacgtctgtagcgaccctttgcaggcagcggaaccccccacctggcgacaggtgcctctgcggccaaaagccacgtgtataagatacacctgcaaaggcggcacaaccccagtgccacgttgtgagttggatagttgtggaaagagtcaaatggctctcctcaagcgtattcaacaaggggctgaaggatgcccagaaggtaccccattgtatgggatctgatctggggcctcggtgcacatgctttacatgtgtttagtcgaggttaaaaaacgtctaggccccccgaaccacggggacgtggttttcctttgaaaaacacgatgataa

SEQ ID NO: 240 - RNA, 1067 nt, synthetic construct
  source 1..1067: mol_type = other RNA
ttgaaagggggcccgggggatctcccccgcggtaactggtcacagttgccgcggacggagatcatcccccggttaccccctttcgacgcgggtactgcgatagtgccaccccagtccttcctactcccgactcccgaccccaacccaggttccttggaacaggaacaccaatttattcatcccttggatgctgactaatcagaggaacgtcagcattttccggcccaggctaagagaagtagataagttagaatctaaattatttatcatccccttgacgaattcgcgttggaaaagcacctctcacttgccgctcttcacacccatcattctaattcggcccctgtgttgagccccttgttgaagtgtttccctccatcgcgacgtggttggagatctaagttaaccgactccgacgaaactaccatcatgcctccccgattatgtgatgctttctgccctgctgggtggagcatcctcgggttgagaaatctttcttccttttaccttggactccggtcccccggtctaagccgcttggaataagacagggttatcttcactcctcttcttttctacttcacagtgttctatgctgtgaaagggtatgtgtcgccccttccttcttcggagaacacgcgtggcggttttttccgtctctcgacaagcgcgtgtgcgacatgcagagtctcgcgaagaaagcagttctcggtctagctttagtgcccacaagaaaacagctgtagcgaccacacaaaggcagcggaacccccctcctggtaacaggagcctctgcggccaaaagccacgtggataagatccacctttgtgtgcggtgcaaccccagcaccctgttttcttggtgacactctagtgaacccctgaatggcgatcttaagcgcctctgtagggaagccaggaatgtccaggaggtaccccttccgctcggaagggatctgacctggagacacatcacatgtgctttacacctgtgcttgtgtttaaaaattgtcgcagcttccccaaaccaagtggtcttggttttctctttttattatattgtcaat

SEQ ID NO: 241 - RNA, 1064 nt, synthetic construct
  source 1..1064: mol_type = other RNA
ttgaaagggggcccgggggatctcccccgcggcaactggttacagttgtcgcggacggagatcatcccccggtcaccccctttcgacgcgggtactgcgatagtgccacccagtctctcctactcccgactcccgaccctaacccaggttcctcggtataggaacaccactttactcatcccctggatgctgactaatcagaggaacgtcagcattttccggcccaggctaagagaagtagataagttacaatccaaattgatttatcatccccttgacgaattcgcgttggaaaagcacctctcacttgccgctcttcacacccatcattttaattcggcctctgtgttgagccccttgttgaagtgtttctctccatcgcgacgtggttggagatctaagtcaaccgactccgacgaaactaccatcatgtctccccgattatgtgatgctttctgccctgctgggtggagcatcctcgggttgagaaatccttcttcctttcaccttggaccccggtcccccggtctaagccgcttggaataagacagggttattttcacctctttttcttctactccacagtgctctatactgtggaagggtatgtgttgccccttccttcttggagaacgtgcgcggcggtctttccgtctctcgacaagcgcgcgtgcaacatgcagagtaacgcgaagaaagcagttcttggactagctttagtatctgcaagaagacagctgtagcgaccacacaaaggcagcggaacccccctcctggtaacaggagcctctgcggccaaaagccacgtggataagatccacctttgtgtgcggtgcaaccccagcaccctggtttcttgaagatactctagtgaacccttgaatggcaatctcaagcgcctctgtaggaaagccaagaatgtccaggaggtacccctacctcgcggaagggatctgacctggagacacgtcgcaagtgctttacacctgtgctcgtgtttaaaaattgtcacagctttcccaaaccaagtggtcttggttttcctttttattactattgacact

SEQ ID NO: 242 - RNA, 1064 nt, synthetic construct
  source 1..1064: mol_type = other RNA
ttgaaagggggcccgggggatctcccccgcggtaactggtgacagttgtcgcggacggagatcatcccccggttaccccctttcgacgcgggtactgcgatagtgccaccccagtctttcctactcccgactcccgaccctaacccaggttcctcggaacaggaacaccaatttactcatcccctggatgctgactaatcagaggaacgtcagcattttccggcccaggctaagagaagtagataagttagaatccaaattgatttatcatccccttgacgaattcgcgttggaaaaacacctctcacttgccgctcttcacacccattaatttaattcggcctctgtgttgagccccttgttgaagtgtttccctccatcgcgacgtggttggagatctaagtcaaccgactccgacgaaactaccatcatgcctccccgattatgtgatgctttctgccctgctgggtggagcaccctcgggttgagaaaaccttcttcctttttccttggactccggtcccccggtctaagccgctcggaatatgacagggttattttcacctcttcttttctactccacagtgttctatactgtggaagggtatgtgttgccccttccttcttggagaacgtgcgcggcggtctttccgtctctcgacaagcgcgcgtgcaacatacagagtaacgcgaagaaagcagttctcggtctagctctagtgcccacaagaaaacagctgtagcgaccacacaaaggcagcggaacccccctcctggtaacaggagcctctgcggccaaaagccacgtggataagatccacctttgtgtgcggtgcaaccccagcaccctggtttcttggtgacactctagtgaacccctgaatggcaatctcaagcgcctctgtagggaagccaagaatgtccaggaggtaccccttcctctcggaagggatctgacctggagacacatcacacgtgctttacacctgtgcttgtgtttaaaaattgttacagcttccccgaaccaagtggtcttggttttcactttttatcacactgtcaat

SEQ ID NO: 243 - RNA, 1066 nt, synthetic construct
  source 1..1066: mol_type = other RNA
cgcagtacccgcgttgaaagagggagggccggggatgatctccaccgcgacaactgtagccagttgccgcgggagagatccccggggccccctttcaacgcgggtactgcgatagtgccaccccagccttatccttctcccgacttcccgaccctaacccaggttcctcggaaaggaacaccaaaactcaatcccctggatgctgactaatcagaggaaagttggcattttccggcccaggcttagagaagtagataagttagactcaaattgattcaattccccttggcgaatccgcgtcgaggcgccacctctcacttgccgtcctccacacccatccttaattcggcctctgtgttggaccccttgttgaagtggcttccctctgcgcggcgcggttggagaattttgtcatccgactccgacgaaactaccatcatgcctccccgattgtgtgatgccctccgccctgctgggtggagcatcctcgggttgagaaacctcttccttcaaccttggaccccggtcccccggtctaagccgcttggaataagacagggttattttcactctcttcttcttctactccacggatttctattccctggaagggtatgtgttgcccctcgcttcttgcggaacgcgcacggtggtctttccacctctcgaaaagtgtgcgtgcaacatgcagagatacgtgaagaaagcagtttgtgaactagtcctagagcgaacacgaatccggctgtagcgaccacttaagagcagcggaacccccctcccggcgacgggagcctctgcggccaaaagccacgtggataagatccactcttgagtgcggtgcggccccggcaccccggtttcgtggttgttctttgacgaacccacaaatggcgatcttaagcgcctctgtagagaagccaagaatgtccagaaggtacccctatcaagggatctgatctggagacgtgtcacttatgctttacacgagtgctcgcgtttaaaaactgtcacagcttctccaaaccaagtggtcttggttttctccttctaattctctgtcaat

SEQ ID NO: 244 - RNA, 1009 nt, synthetic construct
  source 1..1009: mol_type = other RNA
ggagatcatcccccggttaccccctttcgacgcgggtactgcgatagtgccaccccagtctttcctactcccgactcccgaccctaacccaggttcctcggaacaggaacacaaatttactcatcccctggatgctgactaatcagaggaacgtcagcattttccggcccaggcttagagaagtagataagttagaatctaaattgatatgacttccccttgacgaattcacgttggaaatgcacccctcacttgccgctcttcacacccactaattgattcggcctactgtgttgagccccttgttgaagtgcttccctccctcgtgacgtggttggagaaatcttgtcacccgactccgacgaaactaccatcatgcctccccgattatgtgatgctttctgccctgctgggtggagtatcctcgggttgagaaatccttcttccttttaccttggaccttggtcccccggtctaagccgcttggaataagacagggttattttcacctcttcttcttctacttcatggtgctctataccatgaaagggtatgtgtcgccccttccttcttggagaactcacgcggcggtcttccgtctctcaaaaagcgcgagtgcgacatgcagagtaacgcgaagaaagcagttcctggcctagctctagtgcccacaagaaaacggctgtagcgaccacacaaaggcagcggaactcccctcctggtaacaggagcctctgcggccaaaagccacgtggattagatccacctttgtgtgcggtgcaaccccagcaccccggtttcttgttgacactctagtgaatccttgaatggcaatctcaagcgcctctgtaggaaagccaagaatgtccaggaggtaccccttcctcgcggaagggatctgacctggagacacatcacacgtgctttacacttgtgcttgtgtttaaaaattgtcacagctttcccaaaccaagtggtcttggttttccttttttatcctactgtcaat

SEQ ID NO: 245 - RNA, 196 nt, synthetic construct
  source 1..196: mol_type = other RNA
ggcatacctcaacctgagcggcggctaaggatgccctgaaggtacccatgatgaaatcgctctggcgaccatggatctgattaggggccctgcctggagtggatctatcccacacagcgtagggttaaaaaacgtcgaaccgccccacaatgaccccggcagggatgccggttttctctttaccaaatctgacact

SEQ ID NO: 246 - RNA, 1338 nt, synthetic construct
  source 1..1338: mol_type = other RNA
ggcctagtcgcgtgcggttccctcttgtttttgctatgcaatcggggatgacaccccctttcacgtgggtactacgaaagtgcccctcgctccgaggttaaaggagaacccccccttcttacccccactcagctcgcccttcagtgtgggcgctagcctttccacttgcagcttctgcttgtagatgcttgcaccgtgatcggtgcgcttcttgctttagtcgcttgtgcttctatcgttctgacgattcagtttcctaacgccagtgtttcgacggcccaagggggtagttgcggtcagtattcctaccgcaattatccctttccccgctcgtagctggtttggatcttggatctctctccttccttcccccgtcttcaatttagcttcgtgattgaagcatctcactgtctctagtatttatgtcgaactgacgattgagtacgttcagattgtgtttgggaggcccaagggaccgatggacaacacttcgaaagagtcacttgtccaccgctcctttcccctaccctagcaactctggatttgctcacgtggagttcgaggtctatactttaactctgacttgcttttcttaccttgctatcttgctgacgtggattggttgtagactggttcacgttcccgttagatgctgacgtggagtacgatcgctgtacattccactactgccaattagctcccccttcccgttgctcccctctataaggagagccttctcttgcaaaggtgaagccttcacccccggtcgaagccgcttggaataagacagggttattttctcctcttctcggcgcttgccttttctaagctgaataggtcctatctattcaggcggatggtctggtccgttcctccttggacagagtgtgtatctgggttttccggatctcgaccgcacactcaccagagctcaggagtgactaagtcaaggcccgatctgcggcgaaaaggaaatgaagtattttgcagctgtagcgacctctcaaggccagcggatctccccacctggtaacaggtgcctctggggccaaaagccacgtgttaatagcacccttgagagcggtggtaccccaccaccctgcaaactatggatttgacttagtaaccaaaagattgacttggcatacctcaacctgagcggcggctaaggatgccctgaaggtacccgtgttgaaatcgcttcggcgaccatggatctgatcaggggccctgcctggagtggttctgtcccacacagcgtagggttaaaaaacgtctaaccgccccacaatgaccccggcagggatgccggtttcctttttaccaaatcttgacact

SEQ ID NO: 247 - RNA, 1040 nt, synthetic construct
  source 1..1040: mol_type = other RNA
tttcaaagggggccctggggtctttgtcgcggagatgcgctagcatcttcgcggtaaagaacaccccaggggtaacccctttgaacgcgggactgcgatagtgccaccccacgtctttcccactcctaacccgactcccacctcgggtccaatgaaaggaccaaataattcatcccttgaatgttggctaatcagaggaaagtcagcattttccggcccaggctaagagaaacatataagttagatttgattcaaatcccttgacgaattcgaaacgagatgttctccctcccttgccgcttgttcacacccatacatttaattcggcctcctgtgacaagcccctcggtgaaagaacctctctcttttcgacgtggttggaattaacatcatttccgacgaaagtgctatcatgcctccccgattatgtgatgttttctgccctgctgggcggagcattctcgggttgagaaaccttgaatcttttcctttggaaccttggttcccccggtctaagccgcttggaatatgacagggttattttctttatcttatttctactttcacgggttctatccgtgaaaagggtacgtgttgccccttccttcttcggagaattcacacggcggtctttccgtctctcgacaagtgtgaatgcaacatgccggaaacggtgaagaaaacagttttctgcggaagtctagagtgcgcatcgaaacagctgtagcgacctcacagtagcagcggactcccctcttggcgacaagagcctctgcggccaaaagccccgtggataagatccactgctgtgagcggtgcaaccccagcaccctgattcgatgaacgttctttacggaaccagaggatggttttcctaagccctccggtagagaagccaagaatgtcctgaaggtaccccgcgtgcgggatctgatcaggagaccaattgactgtgctttacaccgtcactttggtttaaaaactgtcacagcttctccaaaccaagtggtcttggttttccaattttattaactggcaat

SEQ ID NO: 248 - RNA, 962 nt, synthetic construct
  source 1..962: mol_type = other RNA
tttgaacgcgggacctgcgaaagtgccaacccacgtctttcccactcctaacccgactcccacctcgggtccaatgaaaggaccaaatatatcatcccttgaatgctggctaatcagaggaaagtcagcattttccggcccaggctaagagaaacacataagttagatttgactcaaatcccttgacgaattcgaaacgagatgttctccctcccttgccgcttgctcacacccacacatttaattcggcctcttgtgacaagccccttggtgaaagaacctctctctttttgacgtggttggaattaacatcatttccgacgaaagtgctatcatgcctccccgattgtgtgatgttttctgccctgctgggcggagcattctcgggttgagaaaccttgaatcttttcctttggaaccttggttcccccggtctaagccgcttggaatatgacagggttattttccttatcttacttctactttcacgggttctatccgtgaaaagggtacgtgttgccccttccttcttcggagaattcacacggcggtctttccgtctctcgacaggtgtgaatgcaacatgccggaaacggtgaagaaaacagttttctgcggaagtcttgagtgcgcatcgaaacagctgtagcgacctcacagtagcagcggactcccctcttggtgacaagagcctctgcggccaaaagccccgtggataagatccactgctgtgagcggtgcaaccccagcaccctgattcgatgaacattctttacggaaccagaagatggttttcttaagccctccggtagagaagccaagaatgtcctgaaggtaccccgcgtgcgggatctgatcaggagaccaattgactgtgctttacactgtcactttggtttaaaaactgtcacagcttctccaaaccaagtggtcttggttttccaattttactaactggcaat

SEQ ID NO: 249 - RNA, 1043 nt, synthetic construct
  source 1..1043: mol_type = other RNA
tttcaaagggggccctggggtcttcgtcgcggaggtgcgctagcaccttcgcggcgaagaacaccccaggggtaccccctttgaacgcgggacctgcgagagtgccaacccacgtcttttcccacttttaccccggttcccacctcgggtccaatgaaaggaccaagcaattcatcccctgaatgttggctaatcagaggaaagtcaacattttccggcccaggctaagagaaacatataagttagatttgattcaaatcccttgacgaattcggaacgagatgttctccctcccttgccgcttgttcacacccatgttttagattcggcctcttgtgacaagccccttggtgaaagaacctctctcttttcgacgtggttggaattaacatcatttccgacgaaagtgctatcatgcctccccgattgtgtgatgttttctgccctgctgggcggaacattctcgggttgagaaaccttgaatcttttcctttggaaccttggttcccccggtctaagccgcttggaatatgacagggttattttctaaatcttatttccacttttgtgggttctatccacaaaaagggtacgtgctgccccttccttctttggagaactcgcacggcggtctttccgtctctcaacaagtgtgagtgcagcatgccggaaacggtgaagaaaacagtttcttgtggaagtctagagtgcacatcgaaacagctgtagcgacctcacagtagcagcggactcccctcttggcgacaagagcctctgcggccaaaagccccgtggataagatccactgctgtgagcggtgcaaccccagcaccctgattcgatggtcattctctacggaaccaggaaatggttttcttaagccctccggcagagaagccaagaatgtcctgaaggtaccccgcgtgcgggatctgatcaggagaccaatcgacagtgctttacactgtcgctttggtttaaaaactgtcacagcttctccaaaccaagtggtcttggttttctaatttttgttgaatggcaat

SEQ ID NO: 250 - RNA, 661 nt, synthetic construct
  source 1..661: mol_type = other RNA
tcccttgccgcttgttcacacccatatatttaattcggcctcttgtgacaagccccttggtgaaagaacctctctcttttcgacgtggttggaattaacatcatttccgacgaaagtgctatcatgcctccccgattatgtgatgttttctgccctgctgggcggagcattctcgggttgagaaaccttgaatcttttcctttggaaccttggttcccccggtctaagccgcttggaatatgacagggttattttctttatcttatttctactttcacgggttctatccgtgaaaagggtatgtgttgccccttccttcttcggagaattcacacggcggtctttccgtctctcgacaagtgtgaatgcaacatgccggaaacggtgaagaaaacagttttctgcggaagtctagattgtgcatcgaaacagctgtagcgacctcacagtagcagcggactcccctcttggcgacaagagcctctgcggccaaaagccccgtggataagatccactgctgtgagcggtgcaaccccagcaccctgattcgatgaacattctctacggaaccagaggatggttttctcaagccctccggtagagaagccaagaatgtcctgaaggtaccccgcgtgcgggatctgatcaggagaccaattga

SEQ ID NO: 251 - RNA, 724 nt, synthetic construct
  source 1..724: mol_type = other RNA
gagaaacatataagttagatctgatccaaatcccttgacgaattcgaaatgagatgttttccctcccttgccgcttgttcacacccatatttgtgattcggcctcttgtgacaagccccttggtgaaagaacctctctcttttcgacgtggttggaattaacatcttttccgacgaaagtgctatcatgcctccccgattatgtgatgctttctgccctgctgggcggagcattctcgggttgagaaaccttgaatcttttcctttggaaccttggttcccccggtctaagccgcttggaatatgacagggttattttctttatcttatttctactttcacgggttctatccgtgaaaagggtacgtgttgccccttccttcttcggagaattcacacggcggtctttccgtctctcgacaagtgtgaatgcaacatgccggaaacggtgaagaaaacagttttctgcggaagtctagagtgcacatcgaaacggctgtagcgacctcacagtagcagtggactcccctcttggcgacaagagcctctgcggccaaaagccccgtggataagatccactgctgtgagcggtgcatccccagcaccctgattcgatgagcattctctacggaaccagagaatggttttctcaagccctccggtagagaagccaagaatgtcctgaaggtaccccgcgtgcgggatctgatcaggagaccaattga

SEQ ID NO: 252 - RNA, 1042 nt, synthetic construct
  source 1..1042: mol_type = other RNA
tttcaaagggggccctggggtctttgtcgcggagatgcgctagcatcttcgcggtgaagaacaccccaggggtaccccctttggacgcgggacctgcgagagtgccaacccacgtcttttcccatccctaccccgacactcacctcgggtccaatgaaaggaccaaatatttcatcccctgaatgctggctaatcagaggaaagtcagcattttccggcccaggctaagagaaacatataagttagatttgactttaatcccttgacgaattcggaacgagatgttctccctcccttgccgcttgttcacacccatactttcaattcgaccccttgtgacaagccccttggtgaaagaacctctctcttttcgacgtggttggaattaacaccatttccgacgaaagtgttatcatgcctccccgattatgtgatgctttctgccctgctgggcggagcactctcgggttgagaaaccttgagccttttcttttggaaccttggttcccccggtctaagccgcttggaatatgacagggttatcttctttatcttatttctactttcacggggtctatccgtgaaaagggtacgtgttgccccttccttcttcggagaattcacacggcggtctttccgtctctcgacaagtgtgaatgcaacatgccggaaccggtgaagaaaacagttctttgtggaagtctagagtgtacatcgaaacagctgtagcgacctcacagtagcagcggactcccctcttggcgacaagagcctctgcggccaaaagccccgtggataagatccactgctgtgagcggtgcaaccccagcaccctgattcgatgaacattctttacggaaccagaggatggttttctcaagccctccggtagagaagccaagaatgtcctgaaggtaccccgcgtgcgggatctgatcaggagaccaattgactgtgctttacaccgtcactttggtttaaaaattgtcacagcttctccaaaccaagtggtcttggttttcccattttgttgactggcaat

SEQ ID NO: 253 - RNA, 1042 nt, synthetic construct
  source 1..1042: mol_type = other RNA
tttcaaagggggccctggggtcttcgtcgcggagatgcgctagcatcttcgcggcgaagaacaccccaggggtaccccctttgaacgcgggacctgcgacagtgccaacccacgtcttttcctactcccatcccggctcccacctcgagtccatagaaaggaccaagtacatcatcccttggatgctggctaatcagaggaaagtcagcattttccggcccaggctaagagaaacatataagttagaaatgatcacaatcccttgacgaaatcagaacgagatgttctccctcccttgccgcttgttcacacccacttcattaattcggccttttgtgacaagccccttggtgaaaggacctctctctttctgacgtggttggaattgacatcttttccgacgaaagtgctatcgtgcctccccgattatgtgatgttttctgccctgctgggcagagcattctcgggttgagaaaccttgaacctcttcctttggaaccttggttcccccggtctaagccgcttggaatatgacagggttattttccttatcttatttctactttcatgggttctatccatgaaaagggtatgtgttgccccttccttcttcggagaattcacacggcggtctttccgtctctcgacaagtgtgaatgcaacatgccggaaacggtgaagaaaacagttctctgtggaagtctagagcgcgcatcgaaacagctgtagcgacctcacagtagcagcggactcccctcttggcgacaagagcccctgcggccaaaagccccgtggataagatccactgctgtgagcggtgcaaccccagcaccctgattcgatgaacgttctttacggaaccagaggatggttttctcaagccctccggtagagaagccaagaatgtcctgaaggtaccccgcgtgcgggatctgatcaggagaccaattgacggtgctttacaccgtcactttggtttaaaaactgtcacagcttctccaaaccaagtggtcttggttttctacttttattgactggcaat

SEQ ID NO: 254 - RNA, 1039 nt, synthetic construct
  source 1..1039: mol_type = other RNA
ttcaaagggggccctggggtctttgtcgcggagatgcgctagcatcttcgcggcaaagaacaccccaggggtaccccctttgaacgcgggtcctgcgaaagtgccaacccatgtctttcccactctttccccgactcccacctcgggtctaatgaaaagaccaaatatttcatcccttgaatgctggctaatcagaggaaagtcagcattttccggcccaggctaagagaaacatataagttagatttgatttaatcccttgacgaattcgaaacgagacgttttccctcccttgccgcttgttcacacccacttatttaattcggccttttgtgacaagcccctcggtgaaagaacctctctcttttcgacgtggttggaattaccatcatctccgacgaaagtgctatcatgcctccccgattatgtgatgttttctgccctgctgggcggagcattctcgggttgagaaaccttgaatcttttcctttggaaccttggttcccccggtctaagccgcttggaatatgacagggttattttcttaatcttatttctacttttacgggctctatccgtaaaaagggtacgtgctgccccttccttctctggagaatctacacggcggtctttccgtctcttaacaagtgtggatgcagcatgccggaaacggtgaagaaaacagttttctgtggaagtttagagtgcacatcgaaacagctgtagcgacctcacagtagcagcggactcccctcttggcgacaagagcctctgcggccaaaagccccgtggataagatccactgctgtgagcggtgcaaccccagcaccctgattcgatggtcattctctacggaaccagaaaatggttttctcaagccctccggtagagaagccaagaatgtcctgaaggtaccccgcgtgcgggatctgatcaggagaccaattgacggtgctttacactgtcactttggtttaaaaattgtcacagcttctccaaaccaagtggtcttggttttccaattttgttgagtggcaat

SEQ ID NO: 255 - RNA, 1042 nt, synthetic construct
  source 1..1042: mol_type = other RNA
tttcaaaggggggccctggggtctttgtcgcggagatgcgctagcatcttcgcggtaaagaacaccccaggggcaccccctttgaacgcgggacctgcgaaagtgccaacccacgtctttcccactcttatcccgattcccacctcgggtccaaagaaaggaccaattatttcatccctcgaatgctggctaatcagaggaaagtcagcattttccggcccaggctaagagaaacatataagttagatttggttcaaatcccttgacgaatttggaacgagatgttctccctcccttgccgcttgttcacacccacacatttaattcggcctattgtgacaagccccttggtgaaagaacctctctctttccaacgtggttggaattaacatcatttccgacgaaagtgttatcatgcctccccgattatgtgatgctttctgccctgctgggcggagcattctcgggtcgagaaaccttgaatcttttctcatggaaccttggttcccccggtctaagccgcttggaataagacagggttattttctttatcttgtttctacttttatgggttctatccataaaaagggtatgtgctgccccttccttcttcggagaattcacacggcggtctttccgtctctcgacaggtgtgaatgcagcatgccggaaacggtgaagaaaacagttttctgtggaagtctagagtgtacatcgaaacagctgtagcgacctcacagtagcagcggactcccctcttggtaacaagagcctctgcggccaaaagccccgtggatcagatccactgctgtgagcggtgcaaccccggcaccctgattcgatggacattctctacggaaccagagaatggttttctcaagccctccggtagagaagccaggaatgtcctgaaggtaccccgcgtgcgggatctgatcaggagaccaaatagcagtgctttacgctgttactttggtttaaaaattgtcacagcttctccaaaccaagtggtcttggttttctaattttattgaatggcaat

SEQ ID NO: 256 - RNA, 1039 nt, synthetic construct
  source 1..1039: mol_type = other RNA
tcaaagggggccctggggtcttcgtcgcggagatgcgttagcatcttcgcggtgaagaacaccccaggggtaccccctttgaacgcgggacctgcgagagtgccaacccacgtctatcccactcctaacccgacccccacctcgggtcctacgaaaggaccaaaaatttcatcccttgaatgctggctaatcagaggaaagtcagcattttccggcccaggctaagagaaacatataagttagatttgattcaaatcccttgacgaattcgaaacgagatgttctccctcccttgccgcttgttcacacccatacacttaattcggcctcttgtgacaagcccctcggtgaaagaacctctctcttttcgacgtggttggaattaacatcatttccgacgaaagtgctatcatgcctccccgattgtgtgatgttttctgccctgctgggcggagcattctcgggttgagaaaccttgaatcttttcctttggaaccttggttcccccggtctaagccgcttggaatatgacagggttattttctttatcttatttctactttcacgggttctatccgtgaaaagggtatgtgttgccccttccttcttcggagaattcacacggcggtctttccgtctctcgacaagtgtgaatgcaacatgccggaaacggtgaagaaaacagttttctgcggaagtctagagtgcgcatcgaaacggctgtagcgacctcacagtagcagcggactcccctcttggtgacaagagcctctgcggccaaaagccccgtggataagatccactgctgtgagcggtgcaaccccagcaccctgattcgatgaacactctttacggaaccagaggatggttttcttaagccctccggtagagaagccaagaatgtcctgaaggtaccccgcgtgcgggatctgatcaggagaccaattgactgtgctttacaccgtcactttggtttaaaaactgtcacagcttctccaaaccaagtggtcttggttttccatttttgttgactggcaat

SEQ ID NO: 257 - RNA, 1040 nt, synthetic construct
  source 1..1040: mol_type = other RNA
tttcaaaggcgggcctgggggtgtgggtcgcggcacacagtcatgtgtgtcgcggtccactccctcagcaacccgtctttggacgtgggtactacgatagtgccatccaattcccctaaccttgttaccttccgagcgacctccaacacccgaggtgctcaccaccctgtaaggaaaaatgaaatttcgtctggtgctggctaacagataagatctagcattttccggcccaggctaagaaacctctataaagtagatcgataaacttaaattggcgaactgtacaaagaacggtcctctaccttgccgccacacacacccaaccctaaaatttggcctttagtgtgtggccccttgtgtatgacctcaactcttgcgtacacgcggaatttaacatctttccgctgaaaggagttttcgtgcctccccgattatgtgatgctcgtcctttgctgggcggagcaacgcacgaaacaagccttttctttactaatggaatccaattcccccggtctaagccgcttggaataagacagggttattttcaccccctcttcttctactctcacagagctctattctgtgagaagggaatgttgcgcccctccttcttgggagctcgcttggcggtctttccgtctctgtgcaagagcgagtgcgcaatgtgttagaaggtgaagaaagatattttgggactaacgtttgacacggaacgaaaacgtctgtagcgacctcacaaaggcagcggaacccccctcctggtgacaggagcctctgcggccaaaagccacgtggttagcagccacctttgtgagcggcgtgaacccgacgccacggtttcgttgtgtgacactcactacccccattcggtctttcttaagccctaacacaggtccaccaagaatgtcctgaaggtacctcttcggagatctgatcaggagcttcatgccggtgctttacaccggttcggaagttaaaaactgtcacagtggacccaaatctagatggttctagatttctattggttttaaaatttcatt

SEQ ID NO: 258 - RNA, 832 nt, synthetic construct
  source 1..832: mol_type = other RNA
ctagactttctaccctcttgaatggcgaattccagagtaaagtcacctctgccttgccgctatacacacccaaccaatcgattcggccccacgtgtatagccccttggtcaagtgacctcttacgtctggacgcggatttaagacctgaatatccgctgaaagttaacaccatgtttgccccgattatgtgatgtttctgctcttgctgggcggaacatccgtcgggatgccaaagcaatttgtgtccccttctttctttggacttcggtcccccggtcgaagccgcttggaataagacagggttattttccctccttcctctcttctactttgttaagctctatttaacaaaagggtatgtctggcccctcccttcttggggaatgtgcgcggcggtctttccgtctctcgaaaagcgtgcatgccagatgcaagagaaggtgaagaaagtaagttgtgtctaacgttaagacaggaacgaatgtgtctgtagcgacctctcaaaggctgcggtctccccacctggtaacaggtgccgcagcggccaaaagccacgtggttaacagccacctttgagagcggtgcaaccccagcaccacactttcgttgttgttttctcactaaccacaactcgcttctctgaagccctcttgtagagttgccaagaatgtccagaaggtaccccggtccacgggatctgatctggagctccatgcgtgtgctctacacacgttcgggagttaaaaactgtcacagcaactccaaactaggtggtcctagttttcacttttatttgtcaagtcatatggtgatggttaaaggagaacgaca

SEQ ID NO: 259 - RNA, 747 nt, synthetic construct
  source 1..747: mol_type = other RNA
tttaaaacagcctgtgggttgctcccacccacagggcccactgggcgctagcacactgattttacggaatctttgtgcgcctgttttatatcccctcccccaaacagtaatttagaagtttaatgcatttatggccagtagcgggcatgacgcaccagtcatgtcttggtcaagcacttctgttttcccggactgagtatcaataaactgctcacgcggttgaaggagaaaacgttcgttacccggctaactacttcgagaaacccagtaacaccatgaaagttgcggagtgtttcgctcagcacttcccccgtgtagatcaggtcgatgagtcactgtaaaccccacgggcgaccgtgacagtggctgcgttggcggcctgcccatgggacaacccatgggacgctctaatacagacatggtgtgaagagtctattgagctagttagtagtcctccggcccctgaatgcggctaatcctaactgcggagcacacaccctcaatccagggggcagtgtgtcgtaacgggcaactctgcagcggaaccgactactttgggtgtccgtgtttccttttattcttattgtggctgcttatggtgacaattaaagaattgttaccatatagctattggattggccatccggtgtctaacagagcaattgtgtatttatttgctggatttgttccattatcatacacatcttttaatactttatactttattataaaattgaacacaagaaa

SEQ ID NO: 260 - RNA, 741 nt, synthetic construct
  source 1..741: mol_type = other RNA
ttaaaacagcctgtgggttgcacccacccacagggcccactgggcgccagcactctggtatcgcggtacctttgtgcgcctgttttatgacccctccccaaccgaaacttagaagttacacataccgatcaatagtgggcatagcacgccagctgtgtcttgatcaagcacttctgtttccccggaccgagtatcaatagactgctcacgcggttgaaggagaaagcgttcgttatccggctaactacttcgagaaacctagtaacaccatgaaagttgcggagtgtttcgctcagcacttccccagtgtagatcaggtcgatgagtcaccgcgttccccacgggcgaccgtggcggtggctgcgctggcggcctgcctatgggatgacccataggacgcttcaacacagacatggtgtgaagagtctattgagctagttagtagtcctccggcccctgaatgcggctaatcctaactgcggagcacgtgccctcaagccagagggtggcgtgtcgtaacgggcaactctgcagcggaaccgactactttgggagtccgtgtttccttttattcttacactggctgcttatggtgacaattgagagattgttaccatatagctattggattggccatccggtgagcaacagagcgattgtatactcttttgtgggttttgtgccattaaatcttactgtgattaccacactgaaactcatcttgcagtttaatacagcaaa

SEQ ID NO: 261 - RNA, 745 nt, synthetic construct
  source 1..745: mol_type = other RNA
ttaaaacagcctgtgggttgcacccactcacagggcccactgggcgctagcacactgatttcccggaatccttgtgcgcctgttttatatcccctcccccatgcgcaacttagaagcaatctacaccttcgatcaatagcaggcgtggcgcgccagccatgtctagatcaagcacttctgtttccccggactgagtatcaataaactgctcacgcggttgaaggagaaaatgttcgttacccggctaactacttcgagaaacctagtagcaccatgaaaattgcagagcgtttcgctcagcgcttcccccgcgtagatcaggctgatgagtcactgcattcctcacgggcgaccgtggcagtggctgcgttggcggcctgcccatggggtaacccatgggacgctctaatatggacatggtgtgaagagtctattgagctagttagtagtcctccggcccctgaatgcggctaatcctaactgcggagcacatacccccaaaccagggggcggtgtgtcgtaacgggcaactctgcagcggaaccgactactttgggtgtccgtgtttccttttattcttatattggctgcttatggtgacaattgaaagattgttaccatatagctattggattggccatccggtgaataacagagccttgatatacctttttgtagggtttataccacttactcttcgcgttgttgagactctaaagtacattctaatcttgaacactagaaa

SEQ ID NO: 262 - RNA, 742 nt, synthetic construct
  source 1..742: mol_type = other RNA
tttaaaacagcctgtgggttgtccccacccacagggcccactgggcgttagcactctggtattacggtacctttgtgcgcctgttttataacccctccccaactgtaaattagaagcaacacacgtcgatcaatagtaggcgtgacgcaccagtcacgtcttgatcaagcacttctgtttccccggaccgagtatcaatagactgctcacgcggttgaaggagaaaacgttcgttacccgaccaactacttcgaaaaacctagtagcaccatgaaggttgcggagtgtttcgctcggcacttccccagtgtagatcaggtcgatgagtcaccgcattccccacgggcgaccgtggcggtggctgcgctggcggcctgcctatggggtaacccataggacgctctaatacggacatggtgcgaagagtctattgagctagttggtagtcctccggcccctgaatgcggctaatcctaactgcggagcgcgcgcccccattccaggaggtagcgcgtcgtaacgggcaactctgcagcggaaccgactactttgggtgtccgtgtttccttttatctttattctggctgcttatggtgacaattgacagattgttaccatatagctattggattggccatccggtcacaagcagagcgattatctaccaatttattggatttatcccactgcacactcgtgaatataacacattactgctgatactgagtttggacaaagcaaa

SEQ ID NO: 263 - RNA, 743 nt, synthetic construct
  source 1..743: mol_type = other RNA
ttaaaacagcctgtgggttgcacccacccacagggcccaatgggcgtcagcactctggtaccgaggtacctttgtgcgcctgttttatttccccttcccctgatgcaacttagaagctccgaactaatgatcaatagtaggtgtggcacgccagccacatcttgatcaagcacttctgtttacccggaccgagtatcaataagctgcgcaagcggctgaaggagaaagcgttcgttatccggccaactacttcgagaagcttagtaccaccatgaacgttgcagagtgtttcgttcagcacaaccccggtgtagatcaggccgatgagtcaccgcgttccccatgggcgaccatggcggtggctgcgttggcggcctgcccatggagcaatccatgggacgctctaatactgacatggtgcgaagagcctattgagctagttggtgatcctccggcccctgaatgcggctaatcctaactgcggagcatgcgcccacaagccagtgggtggtgtgtcgtaacgggtaactctgcagcggaaccgactactttgggtgtccgtgtttccttttatctttacattggctgcttatggtgacaattgaagaattgttaccatatagctattggattggccatccggtgtgcaatagagcgattatatacctatttgttggatttgttccattgacatatagatctcttaacactctacaacacatcttgatcttgaacacgagaaa

SEQ ID NO: 264 - RNA, 744 nt, synthetic construct
  source 1..744: mol_type = other RNA
ttaaaacagcctgtgggttgcacccactcacagggcccactgggcgctagcactctggtaccgtggtacctttgtgcgcctgttttatacccccttccccgtttgaacattagaagtaacgcacctcgatcagtagcaggcgcggcgcaccagccgtgtcttgatcaagcacttctgtttccccggaccgagtatcaatagactgctcacgcggttgaaggagaaaacgttcgttatccggctaactacttcgagaaacttagtagcaccatggaagttgcagagtgtttcgctcagcactccccccccagtgtagatcaggctgatggatcaccgcgttcctcacgggtgaccgtggcggtggtcgcgttggcggcctgcccatggggcaacccatgggacgctctaatatggacatggtgtgaagagtctattgagctagttagtagtcctccggcccctgaatgcggctaatcctaactgcggagcacgtgtccccaacccaggggatagcgtgtcgtaacgggtaactctgcagcggaaccgactactttgggtgtccgtgtttcctttattcttatcctggctgcttatggtgacaattgagagattgttaccatatagctattggattggccatccggtgtctaacagagctataatatatctttttgttgggttcgtacccctcaattttgaggttgttctcacattaaagtacatcttggtgttaaatatcagaag

SEQ ID NO: 265 - RNA, 745 nt, synthetic construct
  source 1..745: mol_type = other RNA
ttaaaacagcctgtgggttgtacccacccacagggcccactgggcgctagcactctggtactacggtacctttgtgtgcctgttttaagcccctaccccccactcgtaacttagaaggcttctcacactcgatcaatagtaggtgtggcacgccagtcacaccgtgatcaagcacttctgttaccccggtctgagtaccaataagctgctaacgcggctgaaggggaaaacgatcgttatccggctaactacttcgagaaacccagtaccaccatgaacgttgcagggtgtttcgctcggcacaaccccagtgtagatcaggtcgatgagtcaccgtattccccacgggcgaccgtggcggtggctgcgttggcggcctgcccatggggtgacccatgggacgctctaatactgacatggtgcgaagagtctattgagctagttagtagtcctccggcccctgaatgcggctaatcctaactgcggagcacatacccttaatccaaagggcagtgtgtcgtaacgggcaactctgcagcggaaccgactactttgggtgtccgtgtttccttttattcttacattggctgcttatggtgacaattgaaaagttgttaccatatagctattggattggccatccggtgacaaatagagctattgtatatctttttgttggttacgtaccccttaattacaaagtggtttcaactttgaaatacatcctaacactaaattgtagaaa

SEQ ID NO: 266 - RNA, 755 nt, synthetic construct
  source 1..755: mol_type = other RNA
ttaaaacagcctgtgggttgtacccacccacagggcccactgggcgctagcacactgattctgcgggatctttgtgcgcctgttttatatcccctccccccaaactaggtaacttagaagattagcacttgtatgaccaatagtaggcgtgacgcgccagtcatgtcttggtcaagcacttctgtttccccggactgagtatcaataagctgcttgcgcggctgaaggagaaaacgttcgttacccggctaactacttcgagaaacctagtaacaccatgaaagttgcggagtgtttcgctcagcacttcccccgtgtagatcaggtcgatgagtcactgcaaaccccacgggtgaccgtggcagtggctgcgttggcggcctgcctatgggtcaacccataggacgctctaatacagacatggtgtgaagagtctattgagctagttagtagtcctccggcccctgaatgcggctaatcctaactgcggagcacacgcttgcaaaccagtgagtagtgtgtcgtaatgggcaactctgcagcggaaccgactactttgggtgtccgtgtttccttttattctcatactggctgcttatggtgacaattgaagaattgttactatatagctattggattggccatccggtgtgtaacagagcgataatctactcctttgttgcatttgttccactaacccttactacattagacattctacaatacatactttatctcaactccaagaaacgaac

SEQ ID NO: 267 - RNA, 750 nt, synthetic construct
  source 1..750: mol_type = other RNA
ttaaaacagcctgtgggttgtacccacccacagggcccactgggcgctagcactctgattctacggaatccttgtgcgcctgttttatgtcccttcccccaatcagtaacttagaagcattgcacctctttcgaccgttagcaggcgtggcgcaccagccatgtcttggtcaagcacttctgtttccccggaccgagtatcaatagactgctcacgcggttgagggagaaaacgtccgttacccggctaactacttcgagaagcctagtagcaccatgaaagttgcagagtgtttcgctcagcacttcccccgtgtagatcaggtcgatgagtcactgcgatccccacgggcgaccgtggcagtggctgcgttggcggcctgcctgtggggtaacccacaggacgctctaatatggacatggtgcaaagagtctattgagctagttagtagtcctccggcccctgaatgcggctaatcctaactgcggagcacataccctcgacccagggggcagtgtgtcgtaacgggcaactctgcagcggaaccgactactttgggtgtccgtgtttccttttattcttatactggctgcttatggtgacaattgaaagattgttaccatatagctattggattggccatccggtgtgcaacagagctattatttacctatttgttgggtatataccactcacatccagaaaaaccctcgacacactagtatacattctttacttgaattctagaaa

SEQ ID NO: 268 - RNA, 743 nt, synthetic construct
  source 1..743: mol_type = other RNA
ttaaaacagctgtgggttgtcacccacccacagggtccactgggcgctagtacactggtatctcggtacctttgtacgcctgttttataccccctccctgatttgcaacttagaagcaacgcaaaccagatcaatagtaggtgtgacataccagtcgcatcttgatcaagcacttctgtatccccggaccgagtatcaatagactgtgcacacggttgaaggagaaaacgtccgttacccggctaactacttcgagaagcctagtaacgccattgaagttgcagagtgtttcgctcagcactccccccgtgtagatcaggtcgatgagtcaccgcattccccacgggcgaccgtggcggtggctgcgttggcggcctgcctatggggtaacccataggacgctctaatacggacatggcgtgaagagtctattgagctagttagtagtcctccggcccctgaatgcggctaatcctaactgcggagcacatacccttaatccaaagggcagtgtgtcgtaacgggcaactctgcagcggaaccgactactttgggtgtccgtgtttctttttattcttgtattggctgcttatggtgacaattaaagaattgttaccatatagctattggattggccatccagtgtcaaacagagctattgtatatctctttgttggattcacacctctcactcttgaaacgttacacaccctcaattacattatactgctgaacacgaagcg

SEQ ID NO: 269 - RNA, 747 nt, synthetic construct
  source 1..747: mol_type = other RNA
tttaaaacagcctgtgggttgtacccacccacagggcccactgggcgctagcacaccggtattacggtacccttgtgcgcctgttttatataccctcccccttgtaacttagaagaaacaaataaacgatcaatagtaggcttagcgcaccagctaagtcttgatcaagcacctctgttaccccggactgagtatcaataagctgtacccacggctgaaagagaaaacgttcgttatccggctatctacttcgggaaacctagtaccatcatgaagattgcaaagcgtttcgctcagcacaaccccagtgtagatcaggtcgatgagtcactgcattccccacaggcgactgtggcagtggctgcgttggcggcctgcctacggggaaacccgtaggacgctttaatgttaacatggtgcgaagagtctactgagctaggtagtagtcctccggcccctgaatgcggctaatcctaaccacggagcaggtgctcacactccagtgagtggcctgtcgtaacgcgcaagtctgtggcggaaccgactactttgggtgtccgtgtttccttttatttttatcatggctgcttatggtgacaatctaagattgttatcatatagctattggattggccatccggtgaactctagagatattatttacttgtttgttggttttatcaagttaaatatcaccagttacaccactctcctttacattgtactactgaacaatagaaagagaaa

SEQ ID NO: 270 - RNA, 747 nt, synthetic construct
  source 1..747: mol_type = other RNA
ttaaaacagcctctgggttgcacccacccacagggcccactgggcgctagcacactggtatcacggtacctttgtgcgcctgttttatacaccctccccccttgtaacttagaagaaacaaacaaacgatcaatagtaggcttagcactccagctaagtctcgatcaagcacttctgttaccccggaccgagtatcaataggctgtacccacggctgaaagagaaaacgttcgttacccggctatctacttcgggaaacccagtaccatcatgaagattgcaaagcgtttcgctcagcacaaccccagtgtagatcaggtcgatgagtcactgcattccccacaggcgactgtggcagtggctgcgttggcggcctgcctatggggaaacccataggacgctttaatattgacatggtgcgaagagtctactgagctaggtagtagtcctccggcccctgaatgcggctaatcccaaccacggagcaggcgctcacactccagtgagtagcttgtcgtaatgcgaaagtctgtggcggaaccgactactttgggtgtccgtgtttccttttatttttatcatggctgcttatggtgacaatctaagattgttatcatatagctattggattggccatccggtgaattctagagatattatttacttgtttgttggttttaccacattaaacattaccaattacagaactctcctctacatcctgttattgaataatagaaagagaaa

SEQ ID NO: 271 - RNA, 749 nt, synthetic construct
  source 1..749: mol_type = other RNA
ttaaaacagctcttagggttgttcccaccctagaggcccacgtggcggctagcactctggtatcacggtacctttgtgcgcctgttttatacccccctcccccatgtaacttagaagctattaaataaagttcaatagaagggggtacaaaccagtaccaccacgaacaagcacttctgtttccccggtgaagctacatagactgttcccacggttgaaagtggcagatccgttatccgctttggtacttcgagaaacctagtatcatcttggaatcttcgatgcgttgcgttcagcactcaaccccagagtgtagcttaggtcgatgagtctggacgatcctcactggcgacagtggtccaggctgcgttggcggcctacctgtggcgaaagctacaggacgctagttgtgaacaaggtgtgaagagtctattgagctatcaaagagtcctccggcccctgaatgcggctattcccaaccacggagcaagtgctcacaaaccagtgagtggcttgtcgtaacgcgcaagtctgtggcggaaccgactactttgggtgcccgtgtttccttttatttttatcatggctgcttatggtgacaatctaagattgttatcatatagctattggattggccatccggtgactaacagagatatcatatattcatttgttggttttgttaaactagactcaactacattcaagtctcttctcttcatcatacaattgaataatagaaagagaaa

SEQ ID NO: 272 - RNA, 745 nt, synthetic construct
  source 1..745: mol_type = other RNA
ttaaacagctctagggttgttcccaccctagaggcccacgtggcggctagcactctggtatcacggtacctttgtgcgcctgttttatatccctttccccatgtaacttagaagttattaaacaaagttcaatagaagggggtacaaaccagtgccaccacgaacaagcacttctgtttccccggtgaagctgtatagactgtctccacggttgaaaatggcagatccgttacccgctttggtacttcgagaaacctagtatcaccttggaatcttcgatgcgttgcgctcagcactcaaccccagagtgtagcttaggtcgatgagtctggacgatcctcactggtgacagtggtccaggctgcgttggcggcctacctgtggtgaaaaccacaggacgctagttgtgaacaaggtgtgaagagtctattgagctaccaaagagtcctccggcccctgaatgcggctaatcctaaccacggagcaagtgccttcaaaccagtaggtagcttgtcgtaacgcgcaagtctgtggcggaaccgactactttgggtgtccgtgtttccttttattttatcatggctgcttatggtgacaatctaagattgttatcatatagctattggattggccatccggtgactaacagagatctcatatacctttttgttggttttactaaattaaatattaccacgttcaagacacttctccttatcatacaactaaatagtgagaagagaaa

SEQ ID NO: 273 - RNA, 702 nt, synthetic construct
  source 1..702: mol_type = other RNA
tttaaaacagcctgtgggttgtacccacccacagggcccacgcggcgttagtactctggtatcacggtacctttgtatgcctgttttatctcccttcccccgtaacgttagaagaatgaacaaaagacaattagcaaatccaccaacccaggtgggttttcgtcaagcacttctgtttccccggacctagtaccaataagctgtgcccacggctgaaggggaaaacgttcgttatccggctacctacttcgagaagcctagtaccaccaatgattgtctcaagtgttacgctcagcacaaccccagtgtagttcaggtcgatgagtcaccgaattccccacgggcgaccgtgtcggtggctgcgttggcggcctgcctgcgagtttcactcgcaggacgcttgattcatgacatggtgcgaagagcctattgagctaggcagtagtcctccggcccctgaatgcggctaatcctaaccacggagccatgcgtcacaaaccagtggcgtcatggtcgtaacgagcaattctgtggcggaaccgactactttgggtgtccgtgtttcctgttttatttaccttggctgcttatggtgacaatctagagttgtcatcatatagcgattggattggccatccggatattactttgtgtgatttatctcttgctcgtaagcaattttaaatagtttatagcatcatt

SEQ ID NO: 274 - RNA, 748 nt, synthetic construct
  source 1..748: mol_type = other RNA
ttaaaacagcctgtgggttgtacccacccacagggcccactgggcgctagcacactgatttcacggaatccttgtgcgcctgttttacaccccctccccccaactcagtaacttagaagttgtaaacacacgtggccaacagcgggcgtagcgcaccagctatgtcttggtcaagcacttctgtttccccggacagagtatcaataagctgcttgcgcggctgaaggagaaaatgttcgttacccggtcaactacttcgagaaacctagtagcatcatgaatgttgcgaggcgtttcgctcagcacttcccccgtgtagatcaggtcgatgagtcactgcactccccacgggcgaccgtggcagtggctgcgttggcggcctgcccatggggtgacccatgggacgcttcaatacggacatggtgtgaagagtctattgagctagttgataatcctccggcccctgaatgcggctaatcctaactgcggagcacataccctcaacccagggggcggtgtgtcgtaacgggcaactctgcagcggaaccgactactttgggtgtccgtgtttccttttatacttatactggctgcttatggtgacaattgaagaattgttaccatatagctattggattggccatccggtgactaacagagctattatatatttatttgttggatttgttccattaacatacacatctttcagcactttacacctcattttacaatacaatacaagaaa

SEQ ID NO: 275 - RNA, 748 nt, synthetic construct
  source 1..748: mol_type = other RNA
tttaaaacagctctggggttgttcccaccctagaggcccacgtggcggctagcactctggtattacggtacctttgtgcgcctgttttatattcccttccccacgcaacttagaagttattaaacaaagttcaatagaagggggtacaaaccagtaccaccacgaacaagcacttctgtttccccggtgaagctacatagactgttcccacggttgaaagtggcagatccgttatccgctttggtacttcgagaaacctagtatcaccttggaatcttcgatgcgttgcgctcagcactcaatcccagagtgtagcttaggctgatgagtctggacgatcctcactggcgacagtggtccaggctgcgttggcggcctacctgtggtgaaagccacaggacgctagttgtgaacaaggtgtgaagagtctattgagctaccaaagagtcctccggcccctgaatgcggctaatcccaaccacggagcaagcgctcacaaaccagtgagtagcttgtcgtaacgcgcaagtctgtggcggaaccgactactttgggtgtccgtgtttccttttatttttatcatggctgcttatggtgacaatctaagattgttatcatatagcttttggattggccattcggtgactaatagagaccttgtgtatctatttgttggttttaccaaactaaatactattacactcaaaacactccttcttattatacaacttaatagtagaaagagaaa

SEQ ID NO: 276 - RNA, 700 nt, synthetic construct
  source 1..700: mol_type = other RNA
ttaaaacagcctgtgggttgtacccacccgcagggcccactgggcgctagtacactgatatcacggtacctttgtacgcctgttttatctccctacccccatcgtaacttagaagcttaacaatacagatcaatagcctctgcaccaaaccaggtgtggaatgatcaagcatttctgttaccccggacctagtaccaataggctgtgtcaaacggctgaaggggaaaaagttcgttacccggccacctacttcgagaagcctagtagcatcactgaagctgtgaagcgttacgatcagcacaaccccagtgtagttcaggtcgatgagtcactgcattccccacaggcgactgtagcagtggctgcgttggcggcctgcccttggtctctgaccaagggacgctttggagtggatatggtgcgaagagcctattgagctaggtggtagtcctccggcccctgaatgcggctaatcctaaccccggagctggtgcacacaaaccagtgtgtggccagtcgtaatgagcaattctgggatggaaccgactactttgggtgtccgtgtttcctgtttcacttaccttggctgcttatggtgacaattgtatagttgtcatcatatagctattggattggccatccggatattattcttgtgtttatttgtgtaatttgatataatttagaaccctgtataaga

SEQ ID NO: 277 - RNA, 698 nt, synthetic construct
  source 1..698: mol_type = other RNA
ttaaaacagcctgtgggttgttcccacccacagggcccactgggcgctagtactctggtattacggtacctttgtacgcctgttttacaacccttcccccatgtaacttagaagcaacaaataaacgaccaatagcacactcaccaatccagatgagtgatggtcaagcacttctgttaccccgggcttagtaccaatagactgccatcgcggttgaaggggaaaacgctcgttatccggctctctactgcgagaagcctagtaacgccttagaaatgctcaagcgttgcgctcagcacaaccccagtgtagctcaggtcgatgagtcactgcattccccacgggcgaccgtggcagtggctgcgtttgcggcctgcctacagctctacgctgtaggacgcttgtgtatggacatggtgtgaagagcccattgcgctagggagtagtcctccggcccctgaatgcggctaatcctaaccccggagctggtgcttgtaaaccaacaagtggccagtcgtaatgggcaactctgggatggaaccgactactttgggtgtccgtgtttcctgttttatttaccttggctgcttatggtgacaatctagtgttgttgccatatagcgattggattggccatccggatattgttttagacacttgtgtttgtgagtagatctcttctgacataggatataaca

SEQ ID NO: 278 - RNA, 742 nt, synthetic construct
  source 1..742: mol_type = other RNA
ttaaaacagcctgtgggttgtacccacccacagggcccactgggcgctagcactctggtattacggtacctttgtgcgcctgttttatttcccttccccattgtaactttagaagaaacaaaactggatcaatagcccatcacccaaaccagggtggtgacgatcaagcacttctgtttccccggatctagtatcaatagactgttagcacggttgaaggagaacgattcgttatccggctcactacttcgagaagcctagtaccactatgaaagtgaaatagcgtttcgctcagcacaaccccagtgtagatcaggccgatgagtcactgcattccccacgggcgaccgtggcagtggctgcgttggcggcctgcctgtgggtccccccacaggacgctaattcatggacatggtgcgaagagcctattgagctagtgagtagtcctccggcccctgaatgcggctaatcctaaccacggagcatccgctggcagtccagccagtagggtgtcgtaacgggtaactctgtggcggaaccgactactttgggtgtccgtgtttcctgttttacttactttggctgcttatggtgacaatttacggattgttgccatatagctattggattggccatccggattataaacacacaatactgttattttttcctttttgggatttcttcccttgagttttactaattattttatcttgttaatagttttaaagttgaatacatt

SEQ ID NO: 279 - RNA, 744 nt, synthetic construct
  source 1..744: mol_type = other RNA
ttaaaacagcctgtgggttgttcccactcacagggcccaagtggcgtagaactctggtatcacggtacctttgttcgcctattttaaaacccccccccccgtaacttagaagaatgaacaaaacaaactcagtagtaggtaatgcatccagcattatcacgagttaagcacttctgtttccccggtgatggagataggctgtacccacggctgaaactctatgatccgttatccggtatggtactgcgagaagtctagtaccgtcatgaaagttgctaagcgttacgctccccagtaaccccaactggtagttctggctgatgagtctgggcactccccacaggcgactgtggcccaggctgcgttggcggccagctcatcctcattgagggtgagacgcttaaatacagacatggtgagaagaacctattgcgctaccatatagtcctccggcccctgaatgcggctaatcccaacctcggagcattcaactgcaaaccagcagtgagagtgtcgtaacgcgaaagtccgaggcggaaccgactactttgggtgtccgtgtttcctgttttaccttttgatggctgtttatggtgacaatttagagtattcagattgtcatcataaactactaggtcttgccaaccggtctataatatattattttgttggatttgttccactcacgccaattatttacaaaattttgcttagattcctactcgcaaacttaagatatcaaag

SEQ ID NO: 280 - RNA, 742 nt, synthetic construct
  source 1..742: mol_type = other RNA
ttaaaacagcctgtgggttgatcccacccacagggcccattgggcgctagcactctggtatcacggtacctttgtgcgcctgttttataccccctcccccaactgtaacttagaagtaacacacaccgatcaacagtcagcgtggcacaccagccacgttttgatcaagcacttctgttaccccggactgagtatcaatagactgctcacgcggttgaaggagaaagcgttcgttatccggccaactacttcgaaaaacctagtaacaccgtggaagttgcagagtgtttcgctcagcactaccccagtgtagatcaggtcgatgagtcaccgcattccccacgggcgaccgtggcggtggctgcgttggcggcctgcccatggggaaacccatgggacgctctaatacagacatggtgcgaagagtctattgagctagttggtagtcctccggcccctgaatgcggctaatcctaactgcggagcacacaccctcaagccagagggcagtgtgtcgtaacgggcaactctgcagcggaaccgactactttgggtgtccgtgtttcattttattcctatactggctgcttatggtgacaattgagagattgttaccatatagctattggattggccatccggtgaccaatagagctattatatatctctttgttgggtttataccacttagcttgaaagaggttaaaacattacaattcattgttaagttgaatacagcaaa

SEQ ID NO: 281 - RNA, 741 nt, synthetic construct
  source 1..741: mol_type = other RNA
ttaaaacagcctgtgggttgttcccacccacaggcccattgggcgctagcactctggtatcacggtacctttgtgcgcctgttttacatcccctccccaaattgtaatttagaagtttcacacaccgatcattagcaagcgtggcacaccagccatgttttgatcaagcacttctgttaccccggactgagtatcaatagaccgctaacgcggttgaaggagaaaacgttcgttacccggccaactacttcgaaaaacctagtaacaccatggaagttgcggagtgtttcgctcagcactaccccagtgtagatcaggtcgatgagtcaccgcgttccccacgggcgaccgtggcggtggctgcgttggcggcctgcctacggggaaacccgtaggacgctctaatacagacatggtgcgaagagtctattgagctagttggtaatcctccggcccctgaatgcggctaatcctaactgcggagcacataccctcaaaccagggggcagtgtgtcgtaacgggcaactctgcagcggaaccgactactttgggtgtccgtgtttcattttattcctatactggctgcttatggtgacaattgacaggttgttaccatatagttattggattggccatccggtgactaacagagcaattatatatctctttgttgggtttataccacttagcttgaaagaggttaaaacactacatctcatcattaaactaaatacaacaaa

SEQ ID NO: 282 - RNA, 742 nt, synthetic construct
  source 1..742: mol_type = other RNA
ttaaaacagcctgtgggttgatcccacccacagggcccactgggcgctagcacactggtattacggtacctttgtgcgcctgttttatctacccttgcccaatgcaacatagaagcttagtccaaaaggtcaataggcagcccagtgcaccaactgggtccagaccaagcacttctgttaccccggaccaagtatcagtaggctgctcacgcggtgaaggagaaaacgttcgttacccggccaactacttcgagaaacctagtagcaccatgaaggttgcgcagtgtttcgctccgcacagccccagtgtagatcaggtcgatgagccaccgcattccccacggggtgaccgtggcgggtggctgcgttggcggcctgcccatggggtaacccatgggacgcttcaatactgacatggtgtgaagagtctattgagctagttggtagtcctccggcccctgaatgcggctaatcctaactgcggagcgtgcgcttgcaacccagtgagtagcacgtcgtaatgggtaactctgcagcggaaccgactactttgggtgtccgtgtttcctttattccttgtctggctgcttatggtgacaattgagagattgttgccatatagctattggattggccatccggtatctaacagggcgatcatttacctgtttgttggtttcatacccttgaatcttgaggtttataataccctcactcttataataaaactcaatacatcaag

SEQ ID NO: 283 - RNA, 743 nt, synthetic construct
  source 1..743: mol_type = other RNA
ttaaaacagcctgtgggttgtacccacccacagggcccaatgggcgctagcacactggtattccggtacctttgtgcgcctgttttataacccccccccagttcgcaacttagaagcaaagaaacaatggtcaattactgacgcagcaacccagctgtgttttggccaagtacttctgtgtccccggactgagtatcaataagctgcttgcgcggctgaaggagaaaccgttcgttacccggccaactacttcgagaagcctagtaacgccatgaacgttgaggagtgtttcgctcagcacttcccccgtgtagttcaggtcgatgagtcaccgcgttccccacgggtgaccgtggcggtggctgcgttggcggcctgcctgtggggcaacccgcaggacgctctgatacagacatggtgtgaagagcctattgagctagttggtagtcctccggcccctgaatgcggctaatcctaactgcggagcacacgttcgcaagccagcgagtggtgtgtcgtaacgggcaactctgcagcggaaccgagtactttgggtgtccgtgtttccttttattcttaccttggctgcttatggtgacaattgaaagattgttaccatatagctattggattggccatccagtgtcaaatagagcaatcatatatctgtttgttggtttcgttcccttggactacagaaatcttaaaactctttatttcatattgagactcaatacgataaa

SEQ ID NO: 284 - RNA, 742 nt, synthetic construct
  source 1..742: mol_type = other RNA
ttaaaacagcctgtgggttgttcccacccgcagggcccactgggcgccagcactctggtatcacggtacctttgtgcgcctgttttaaaaccctctccccaatttgaaacttagaagcaatacacctcgatcaatagtaggcatgacacgccagccatgtcttgatcaagcacttctgtttccccggactgagtatcaataaactgcttgcgcggtcgaaggagaaaacgtccgttacccgactaactacttcgagaaacccagtaacaccatggaaattgcggagtgtttcactcagcacattcccagtgtagatcaggtcgatgagtcaccgcattccccacgggtgaccgtggcggtggctgcgctggcggcctgcccatggggcaacccatgggacgcttcaatatggacatggtgtgaagagtctattgagctagttagtagtcctccggcccctgaatgcggctaatcctaactgcggagcacgtgcctccattccagggggtggcgtgtcgtaacgggcaactctgcagcggaaccgactactttgggtgtccgtgtttcttttaattttatactggctgcttatggtgacaattgaaagattgttgccatatagctattggattggccatccggtatccaacagagcaattgtgtacctttttgttggatttgtaccacttaccagaacaagttttcatacactgtgttacattattagactaaacacagaaaa

SEQ ID NO: 285 - RNA, 743 nt, synthetic construct
  source 1..743: mol_type = other RNA
ttaaaacagcctgtgggttgtacccacccacagggcccactgggcgctagcactctggtattgcggtacctttgtgcgcctgttttacccaccctcccccaacgtaacttagaagcctgacatatacggtcacaagccagcccagtacgccaactgggtaccgaccaagcacttctgttaccccggactgagtatcaataagctgccaaagcggctgaaggagaaaacgttcgttacccggccaattacttcgagaaacccagtaacaccatgaaagttgcgtagcgtttcattcagcacaatcccagtgtagatcaggtcgatgagtcaccgcattccccacaggcgactgtggcggtggctgcgttggcggcctgcccatggggcaaacccatgggacgcttcaatactgacatggtgcgaagagtctattgagctaattggtagtcctccggcccctgaatgcggctaatcctaactgcggagcaggcactcgcagaccagcgagcagcttgtcgtaatgggcaactccgcagcggaaccgactactttgggtgtccgtgtttcctatttcctttacactggctgcttatggtgacaattgagaaattgttaccatatagctattggagtggccatccggtgactaacagagcaataatatatttgtttgttggctttgtgccacttaatttgaaggttgttaagacgctcaatctgatactacttctaaataaagcaaa

SEQ ID NO: 286 - RNA, 743 nt, synthetic construct
  source 1..743: mol_type = other RNA
tttaaaacagcctgtgggttgttcccacccacaggcgccaccgggcgttagcacactggtatcacggtacccttgtgcgcctgttttataaccccaccccgagtaaaccttagaagcaatgcacctctggtcaatagtaggtgtgacacaccagtcacatcgtgaccaagcacttctgtctccccggactgagtatcaataggctgctcgcgcggctgaaggagaaagcgttcgttacccggccagctacttcgagaagcctagtaacaccatgaaggttgcagagtgtttcgctcagcacttcccctgtgtagatcaggccgatgagtcaccgcgttcctcacgggcgaccgtggcggtcgctgcgctggtggcctgcctatggggcaacccataggacgctctaatgctgacatggtgcgaagagtctattgagctagctggtagtcctccggcccctgaatgcggctaatcccaactgcggagcacgcaccctcaaaccagggggcagcgtgtcgtaacgggcaactctgcagcggaaccgactactttgggtgtccgtgtttctttttattcctatattggctgcttatggtgacaattgagagattgttaccatatagctattggattggccatccggtgagcaacagagctattgtgtatctgtttactggtttcataccccttaattacaaagaagtcaaaacccttcacttgatcttgttattcaatacaacaaa

SEQ ID NO: 287 - RNA, 743 nt, synthetic construct
  source 1..743: mol_type = other RNA
ttaaaacagcctgtgggttgttcccacccacagggcccactgggcgttagcacactggtatcacggtacctttgtgcgcctgttttatactcccccccctaaggaaactttagaagcaaagcaattgtgatcaatagtgggtatggcacaccagtcatatcttgatcaagcacttctgttcccccggacttagtaccaatagactgctcaagcggttgaaggggaaaacgttcgttatccggccaactacttcgagaaacctagtagcaccatgaaagttgcggagtgtttcgctcagcacttcccccgtgtagatcaggctgatgagtcaccgtattccccacgggcgaccgtgacggtggctgcgttggcggcctgcccatggggtaacccatgggacgctctaaaacagacacggtgcgaagagtctattgagctagttggtagtcctccggcccctgaatgcggccaatcctaactgcggagcacatactcccaatccagggagcagtgtgtcgtaatgggtaactctgcagcggaaccgactactttgggtgtccgtgtttccttttattctcacattgactgcttatggtgacaattgaaagattgttaccatatagctattggattggtcatccggtgagcaatagagctattgtttatcaatttgttggatttgtaccactcaacttttctgttttgagaacactcaactacatcttactgctaaacacatcaaa

SEQ ID NO: 288 - RNA, 741 nt, synthetic construct
  source 1..741: mol_type = other RNA
ttaaaacagcctgtgggttgatcccacccacagggcccattgggcgctagcactctggtattacggtacccttgtgcgcctgttttacacgcccctccccaagcaacttagaagtctgtcacaaatggtcaatagacagctcaacacgccagttgagtctagaccaagcacttctgtcgccccggaccgagtatcaatagactgctagcgcggttgaaagagaaaacgttcgttacccggccaactacttcgggaaacctagtaccaccatgaaagttgcgcagtgtttcgctccgcacaaccccagtgtagatcaggtcgatgagccaccgcattccccacaggcgactgtggcggtggctgcgttggcggcctgcccatggtacaacccatgggacgcttcaatactgacatggtgcgaagagtctactgagctagttggtagtcctccggcccctgaatgcggctaatcctaactgcggagcaggtacccacgagccagtgggcagcctgtcgtaatgggcaactctgcagcggaaccgactactttgggtgtccgtgtttccatttactcttatactggctgcttatggtgacaatcacggaattgttaccatatagctattggattggccatccagtgactaacagagcgattatattcctttttgttggttttgtaccactcaccgtcacgagctttacaacgctaaactacattttgtcattgaacacggcaag

SEQ ID NO: 289 - RNA, 743 nt, synthetic construct
  source 1..743: mol_type = other RNA
ttaaaacagcctgtgggttgtacccacccacagggcccactgggcgccagcactctggtattacggtacccttgtgcgcctgttttatatcccttccccaaggtaaacgttagaagcaatgcactcccgatcaatagaaggtgcgacgcgccagtcgtatctcgatcaagcacttctgtttccccggaccgagtatcaatagactgctagcgcggttgaaggagaaaacgttcgttacccgactaactacttcgagaagcccagtagcgccatgaaagttgcagagtgtttcgctcagcacttcccccgtgtagatcaggccgatgagtcaccgcaatccccacgggcgaccgtggcggtggctgcgttggcggcctgcctatggggaaacccataggacgctcaaatacagacatggtgcgaagagtctattgagctagttagtactcctccggcccctgaatgcggctaatcctaactgcggagcaagtactcacaatccagtgggcagcttgtcgtaacgggtaactctgcagcggaaccgactactttgggtgtccgtgtttccttttattcctacattggctgcttatggtgacaatcaaagagttgttaccatatagctattggattggccatccggtgactaataaagcaattatatttctttttgttgggtttgtaccccttaatacaaccagcttcaccacattgtgttacatcattagactgaacaaggcaaa

SEQ ID NO: 290 - RNA, 742 nt, synthetic construct
  source 1..742: mol_type = other RNA
ttaaaacagcctgtgggttgcacccacccacagggcccattgggcgctagcaccctggtattacggtacctttgtgcgcctgttttatacccccatccccaatcgaaacttagaagcattacacactgatcaataggaggcgcggcacgccagccatgccaagatcaagcacttctgtctccccggaccgagtatcaatagactgcttgcgcggttgaaggagaaaacgttcgttacccggccaactacttcgagaaacctagtaccaccatgaaagttgcggagtgtttcgctcagcactaccccagtgtagatcaggccgatgagtcaccgcgttccccacgggtgaccgtggcggtggctgcgctggcggcctgcctatggggcaacccataggacgctctaatacagacatggtgtgaagagtctattgagctagttggtgatcctccggcccctgaatgcggctaatcctaactgcggagcacacgctcacaagccagtgagtggtgtgtcgtaatgggtaactccgcagcggaaccgactactttgggtgtccgtgtttccttttaacttcattttggctgcttatggtgacaattaagaaattgttaccatatagctattggattggccatccggtgactagtagagctattatatacttgtttgttggctttgtaccactaaactataaagtccttagaactcttgattttatactaattttgaataaggcaaa

SEQ ID NO: 291 - RNA, 742 nt, synthetic construct
  source 1..742: mol_type = other RNA
ttaaaacagcctgtgggttgcacccacccacagggcccactgggcgctggtacactggtattaaggtacccttgtacgcctgttttatatccctcccccgatttgtaacttagaattaaagcaaacccgatcaatagtaggtgtggcaaaccagccacatcttgatcaagcacttctgtttccccggaccgagtatcaatagactgctgacgcggttgaaggagaaaacgttcgttacccggccaactacttcgggaaacctagtaccaccatgaaggttgcgcagtgtttcgctccgcacaaccccagtgtagatcaggtcgatgagccaccgcattccccacaggcgactgtggcggtggctgcgttggcggcctgcccatggggtaacccatgggacgcttcaatactgacatggtgcgaagagtccactgagctagttggtattcctccggcccctgaatgcggctaatcctaactgcggagcaggcacccacgagccagtgggcagcctgtcgtaatgggtaactctgcagcggaaccgactactttgggtgtccgtgtttccattttctttttattggctgcttatggtgacaatcacggaattgttaccatatagctattggattggccatccagtgactaacagagcagtaatattcctttttgttggttttgtaccactcaccgtcacgagcctcagaacactcgtattcatcttaacccttaacaagataaa

SEQ ID NO: 292 - RNA, 742 nt, synthetic construct
  source 1..742: mol_type = other RNA
ttaaaacagcctgtgggttgcccccacccgcagggcccattgggcgctagcacactggtatcacggtacctttgtgcgcctgttttatcctccctccccaagtgcaacgtagaagcaagacacaaaaggtcaacagatagcccagcacaccagttgggtttcgaccaagcacttctgtctccccggaccgagtatcaataagctgctcacgcggctgaaggagaaagtgttcgttacccggctagttacttcgagaaacctagtaccaccatgaaggttgcgcagcgtttcgctccgcacaaccccagtgtagatcaggtcgatgagtcaccgcgttccccacgggcgaccgtggcggtggctgcgttggcggcctgcccatggggcaacccatgggacgcttcaatactgacatggtgcgaagagtctattgagctaactagtagtcctccggcccctgaatgcggataatcttaactgcggagcaggtgctcacaatccagtgggtggcctgtcgtaacgggcaactctgcagcggaaccgactactttgggtgtccgtgtttccttttatctctttgttggctgcttatggtgacaattgaacgattgttgccatatagctattggattggccatccggtgagcagcagatccattatttaccagtttgttggatttgtaccacttgatcacatagtctttagaacacttgtctttattctaaatcttaacaaggcaag

SEQ ID NO: 293 - RNA, 742 nt, synthetic construct
  source 1..742: mol_type = other RNA
ttaaaacagcctgtgggttgtacccacccacagggcccattgggcgtcagcaccctggtatcacggtacctttgtgcgcctgttttatatcccttcccccaattgtaacttagaagaaacacacaccgatcaacagcaagcgtggcacaccagccatgttttggtcaagcacttctgttaccccggactgagtatcaatagactgctcacgcggttgaaggagaaagcgtccgttatccggccagctacttcgagaaacctagtaacaccatggaagttgcggagtgtttcgctcagcactaccccagtgtagatcaggtcgatgagtcaccgctttccccacgggcgaccgtggcggtggctgcgttggcggcctgcctatgggggaacccataggacgctctaatacagacatggtgcgaagagtctattgagctagctggtattcctccggcccctgaatgcggctaatcctaactgtggagcacatgcccctaatccaaggggtagtgtgtcgtaatgagcaattccgcagcggaaccgactactttgggtgtccgtgtttcctcttattcttgtactggctgcttatggtgacaattgagagattgttaccatatagctattggattggccatccggtgactaatagagctattgtgtatctctttgttggatttgtaccacttaatttgaaagaaatcaggacactacgctacattttactattgaacaccgcaaa

SEQ ID NO: 294 - RNA, 739 nt, synthetic construct
  source 1..739: mol_type = other RNA
ttaaaacagcctgtgggttgtacccacccacagggcccactgggcgccagcactctggtatcgcggtacctttgtgcgcctgttttgtttccctttaccccgaatggaacttagaagtaatgcacactgatcaatagcaggcgtggcaccagccacgtgatgatcaagcactactgtttccccggaccgagtatcaatagactgcttgcgcggttgaaggagaaaacgttcgttatccggctaactacttcgagaaacccagtaacaccatgaaggttgcaggcgatttcgctcagcacatccccagtgtagatcaggtcgatgagtcaccgcgttcccacgggcgaccgtggcggtggctgcgttggcggcctgcctatggggtaacccataggacgctctaatacggacatggtgcgaagagtctattgagctagttagtgttctccggcccctgaatgcggctaatcctaactgtggagcacatgcccctaatccaaggggtagtgtgtcgtaacgggcaactccgcagcggaaccgactactttgggtgtccgtgtttccttttattcttacattggctgcttatggtgacaattgagagattgttgccatatagctattggattggccatccggtgtctaatagagcgataatctaccagtttgttggatttgtaccactcaacttttcaacactcaagacactcaactacatactagcactcaacacagtaaa

SEQ ID NO: 295 - RNA, 751 nt, synthetic construct
  source 1..751: mol_type = other RNA
ttaaaacagcctgtgggttgtacccacccacagggcccactgggcgctagcacactggtatcacggtacctttgtgcgcctgttttatacccccttcccgcaaccgcaaatttagaagcaaagctaacccgatcgatagcggatgcgcatgccagccgcattttgatcaagtacttctgtttccccggaccgagtatcaatagactgctcacgcggttgaaggagaaaacgtccgttacccgaccaactacttcgagaaacctagtaacatcatgaatgttgcagggcgtttcgatcagcacgaccctggtgtagatcaggctgatgagtcaccgcattccccacgggtgaccgtggcggtggctgcgttggcggcctgcctatggggtgacccataggacgctctaatacggacatggtgcgaagagtctattgagctagttggtagtcctccggcccctgaatgcggttaatcctaactgcggacgacatacccctaatccaaggggcagtgtgtcgtaacgggcaactctgcagcggaaccgactactttgggtgtccgtgtttccttttatttttatactggctgcttatggtgacaatctcagagttgttaccatatagctattggattggccatccggtgagcaacagagctgtcatttatcagtttgttggctttatacctctaaatcacacggttttttttttttggaacgcttgtattcatcttaaccctcaataaggcaaa

SEQ ID NO: 296 - RNA, 741 nt, synthetic construct
  source 1..741: mol_type = other RNA
ttaaaacagcctgtgggttgtccccacccacagggcccactgggcgctagcacactggtatcccggtacctttgtgcgcctgttttatataccctcccctcagtaacctagaagttcatcacaaatgatcaatagttagctcaacaaaccagttgagcctagatcaagcacttctgttaccccgggctgagtatcaataagctgttgacacggctgaaggagaaaacgcccgttacccgaccagctacttcggagaacctagtatcaccatagaggttgcgtagcgtttcgctccgcacaaccccagtgtagatcaggtcgatgagtcaccgcgttccccacaggcgactgtggcggtggctgcgttggcggcctgcccatggggttacccatgggacgcttcaatactgacatggtgtgaagagttgactgagctagctggtagtcctccggcccctgaatgcggctaatcctaactgtggagcaagtgcccacaacccagtgggtggcttgtcgtaatgggcaactctgcagcggaaccgactactttgggtgaccgtgtttctctttattcttatattggctgcttatggtgacaatctcagagttgttaccatatagctattggtttggccaaccagtgactaacagagcaattatatatcttttcattggatttatacctataaacaacaccagttataccactttgtgttacattattggcttgaactcgaaaag

SEQ ID NO: 297 - RNA, 742 nt, synthetic construct
  source 1..742: mol_type = other RNA
ttaaaacagcctgtgggttgtacccacccacagggcccactgggcgccagcacactggtatcacggtacccttgtgcgcctgttttatccacccctccccgaagtaacttagaagctctaaataagcggtcagcagccagcccagcacaccagctgggttttgaccaagtacttctgttaccccggaccgagtatcaataggctgcacacgcggctgaaggagaaaacgttcgttacccggccatctacttcgagaaacctagtaccactatgaaagttgcgaagcgtttcgctccacacaaccccagtgtagatcaggctgatgagtcaccgcattccccacaggtgactgtggcggtggctgcgttggcggcctgcccatggggcaacccatgggacgcttcaataccgacatggtgcgaagagtctattgagctagatggtagtcctccggcccctgaatgcggctaatcctaactgcggagcaggtgcacacaaaccagtgagtagcctgtcgtaatgggcaactctgcagcggaaccgactactttgggtgtccgtgtttctttttattcttatattggctgcttatggtgacaattgaaagattgttaccatatagctattggattggccatccggtgactagcagagcactgatatacctatttgtgggctttgtaccactcaactttgtcagctacaccacattgctatatattgtccaactgaacgcaagaag

SEQ ID NO: 298 - RNA, 741 nt, synthetic construct
  source 1..741: mol_type = other RNA
ttaaaacagcctgtgggttgttcccacccacagggcccacagggcgcaagcacactggtatcacggtacctttgtgcgcctgttttatctaccccccccaaagtaacgtagaagcctgaacaaagtggtcactagtaagctcggtaagccaaccgaggttagaccaagcacttctgtctccccggactgagtatcaataggctgctaacgcggctgaaggagaaaacgttcgttacccgaccagctacttcgagaaacctagtaccaccatggatgttgcgcggcgtttcgttcaacacaaccccagtgtagatcaggtcgatgagtcaccgctctccccacgggcgaccgtggcggtggctgcgttggcggcctgcccatggggcaacccatgggacgcttcaatactgacatggtgcgaagagtctattgagctagctggtagtcctccggcccctgaatgcggctaatcctaactgtggagcaggcgctcgcaaaccagcgagtaacctgtcgtaacgggcaactccgcagcggaaccgactactttgggtgtccgtgtttccttttattcctaccttggctgcttatggtgacaattgagagattgttaccatatagctattggattggccatccggtaagcaacagagcagtaatttacttgttcgttggtttcataccacgtgactttaaagtcttacaaacactaaacctcatattatcatttaatagtgcaaa

SEQ ID NO: 299 - RNA, 743 nt, synthetic construct
  source 1..743: mol_type = other RNA
ttaaaacagcctgtgggttgtacccacccacagggcccactgggcgctagcactctggtattacggtacccttgtgcgcctgttttatataccccgccccaagcaaacgctagatgtaacgcacttatgatcaatagcaggcgtggcactccagccacgttatgatcaagcacttctgtctccccggaccgagtatcaatagactgctcacgcggtcgaaggagaaaacgttcgttacccgaccagctacttcgagaaacctagtaactccatggaggttgcagagtgtttcgttcagcacttcccccgtgtagatcaggctgatgagtcaccgcgttcctcacgggcgaccgtggcggtggctgcgttggcggcctgcctatgggtatacccataggacgctctaatactgacatggtgcgaagagtctattgagctagttggtagtcctccggcccctgaatgcggctaatcctaactgcggagcacatacccccaacccagggggcagtgtgtcgtaacgggtaactctgcagcggaaccgactactttgggtgtccgtgtttccttttattcttacattggctgcttatggtgacaattgagagattgttaccatatagctattggattggccatccagtgactaacagagctattatttacctttttgttggcttcgtatcacttggtttaaaagaggttagtactttatattgcattatattactaaacacgagaaa

SEQ ID NO: 300 - RNA, 742 nt, synthetic construct
  source 1..742: mol_type = other RNA
ttaaaacagcctgtgggttgttcccacccacagggcccactgggcgcaagcacactggtattacggtacctttgtgcgcctgttttacatcccctctcccattataacttagaagcacatacaaaacgaccaataggtggtccagcactccagctgggctctggtcaagtacttctgttaccccggactaagtatcaataagcggctaacgcggctgaaggagaaagcgtccgttacccggccaactacttcgggaaatctagtaacaccatgaaggttgcgcagtgtttcgctccgcacaaacccagtgtagatcaggtcgatgagtcaccgcattccccacaggcgactgtggcggtggctgcgttggcggcctgcccatggggcaacccatgggacgcttcaatactgacatggtgcgaagaatctactgagctagttggtagtcctccggcccctgaatgcggctaatcctaactgcggagcacatacccctaacccaaggggcagtgtgtcgtaacgggcaactctgcagcggaaccgactactttgggtgtccgtgtttccttttattcttatactggctgcttatggtgacaattgagaaattgttaccatatagcttttggattggccatccagtgactaacagagctattatttacttgtttgttggctttgtaccactcaaccttagagttttaaggactctcaatttggttctgctatcgaatacaacaaa

SEQ ID NO: 301 - RNA, 743 nt, synthetic construct
  source 1..743: mol_type = other RNA
ttaaaacagcctgtgggttgttcccacccacagggcccattgggcgctagcactctggtattgcggtacctttgtgcgcctgttttatattccctccccctgaccgtaacttagaagtaacacacaccgatcaacagtaagcatggcacaccagccatgttttgatcaagcacttctgttatcccggactgagtatcaatagactgctcacgcggttgaaggagaaaacgttcgttacccggccaactacttcgaaaaacctagtaacaccatggaagttgcagagtgtttcgctcagcactaccccagtgtagatcaggtcgatgagtcaccgcattccccacgggcgaccgtggcggtggctgcgttggcggcctgcctatggggaaacccataggacgctctaatacagacatggtgcgaagagtctattgagctagttggtagtcctccggcccctgaatgcggctaatcctaactgcggagcacacaccctcaagccagggggcagtgtgtcgtaacgggcaactctgcagcggaaccgactactttgggtgtccgtgtttccccttactcttgtattggctgcttatggtgacaattttggaattgttgccatatagctattggattggccatccggtgacaaacagagcgattgtatacctattcgttggacttgtaccgctcaacgttacgagtctaacgactttatactacatcatctggttgaacacagcaaa

SEQ ID NO: 302 - RNA, 740 nt, synthetic construct
  source 1..740: mol_type = other RNA
ttaaaacagcctgtgggttgtacccacccacagggcccactgggcgctagcactctggtattacggtacctttgtgcgcctgttttacatcccttcccaatcgtaatttagaagccaaacactacgatcaatagtgggcgtggcacgccagccatgtctcgatcaagcactcctgtttccccgggccgagtatcaatagactgctcacgtggttgaaggagaaaacgctcgttatccggctaactacttcgagaaacctagtaacaccatggaagttgcagagtgtttcgttcagcacttccccagtgtagatcaggccgatgagtcaccgcgttccccacgggtgaccgtggcggtggctgcgttggcggcctgcccatggggtaacccatgggacgctctaatatggacatggtgtgaagagtctattgagctagttggtagtcctccggcccctgaatgcggctaatcctaactgcggagcatgtacctccaatccaggaggtggcgtgtcgtaatgggcaactctgcagcggaaccgactactttgggagtccgtgtttccttttattcttacactggctgcttatggtgacaattgagagattgttaccatatagctattggattggccatccggtgactaacagagcagttatctaccagttcgttggtttcattccattgtgtactcgcgaatacaacactcttcttttaatactagatttaaacaaagcaaa

SEQ ID NO: 303 - RNA, 742 nt, synthetic construct
  source 1..742: mol_type = other RNA
ttaaaacagcctgtgggttgtacccacccacagggcccaatgggcgctagcactccggtattacggtacccttgtgcgcctgttttatttccccttccccaactgaaacttagaagaaatacacaatgatcgacagtaagcgtggcgcaccagccatgttttgatcaagcacttctgtttccccggaccaagtatcaatagactgctcacgcggttgaaggagaaagcgttcgttaaccggctaactacttcgagaaacccagtaacaccatgaaagttgcagagtgtttcgctcagcactcccccagtgtggatcaggtcgatgagtcactgcgttccccacgggtgaccgtggcagtggctgcgttggcggcctgcctgtggggcaacccacaggacgctctaatacggacatggtgtgaagagtctattgagctagttagtagtcctccggcccctgaatgcggctaatcctaactgtggagcacatgcccctaacccaaggggtggtgtgtcgtaatgggtaactccgcagcggaaccgactactttgggtgaccgtgtttccttttatttttacattggctgcatatggtgacgattgagagattgttgccatatagctattggattggccatccagtgtctaacagagctattgtatatctttttgttggatttgtaccacttgacttgaaagaggtcaggacactacaatacattatactgctgaatactgcaaa

SEQ ID NO: 304 - RNA, 742 nt, synthetic construct
  source 1..742: mol_type = other RNA
ttaaaacagcctgtgggttgttcccacccacagggcccattgggcgctagcactctggtattacggtacctttgtgcgcctgttttatgtcccctcccccaatcgcaacttagaagcaacacacactgatcaacagtaagcgtggcataccagccacgttttgatcaagcacttctgttaccccggactgagtatcaatagactgctcacgcggttgaaggagaaagcgttcgttatccggccaactacttcgagaaacctagtaacaccgtgaaagttgcagagtgtttcgctcagcactaccccagtgtagatcaggtcgatgagtcaccgcattccccacgggcgaccgtggcggtggctgcgctggcggcctgcctacggggaaacccgtaggacgctctaatacagacatggtgcgaagagtctattgagctagttggtagtcctccggcccctgaatgcggctaatcctaactgcggagcacacacccccaagccagggggcagtgtgtcgtaacgggtaactctgcagcggaaccgactactttgggtgtccgtgtttcattttattcctatgctggctgcttatggtgacaattgacagattgttaccatatagctattggattggccatccggtgactaatagagccattatataccactttgttgggtttataccactcaacttgaaagaggtcaaaacactacagctcatcattaaattgaacacaacaaa

SEQ ID NO: 305 - RNA, 741 nt, synthetic construct
  source 1..741: mol_type = other RNA
ttaaaacagcctgtgggttgttcccacccacagggcccaccgggcgctagcacactggtatcgcggtacctttgtgcgcctgttttatttaccctgccctgatgtaacttagaagcatgacaccaacgatcaatagcaggctcaatgcaccaattgggtcaagatcaagcacttctgttaccccggactgagtatcaataagctgctagcgcggctgaaggagaaaaagttcgttacccggccagctacttcgagaaacctagtatcaccatgaaagttgcgtggcgtttcgctccgcacaaccccagtgtagatcaggtcgatgagtcaccgcattccccacgggcgaccgtggcggtggctgcgttggcggcctgcccgtggagcaatccatgggacgctataatacagacatggtgtgaagagtctattgagctagctggtagtcctccggcccctgaatgcggctaatcctaactgcggagcaggtacccacgaaccagtgggcagtctgtcgtaatgggcaactccgcagcggaaccgactactttgggtgtccgtgtttccttttatttcaacttggctgcttatggtgacaattgagagattgttaccatatagctattggattggccatccggtgactaacagagctatcatatacctttttattggctttgtgccacttactctgaaagaggtcaagactctgcattatatcatactattgaatgctataaa

SEQ ID NO: 306 - RNA, 742 nt, synthetic construct
  source 1..742: mol_type = other RNA
ttaaaacagcctgtgggttgcacccacccacagggcccacagggcgctagcactctggtatcacggtacctttgtgcgcctgttttattaccccttccccaattgaaaattagaagcaatgcacaccgatcaacagcaggcgtggcgcaccagtcacgtctcgatcaagcacttctgtttccccggaccgagtatcaatagactgctcacgcggttgaaggagaaagtgttcgttatccggctaaccacttcgagaaacccagtaacaccatgaaagttgcagggtgtttcgctcagcacttccccagtgtagatcaggtcgatgagtcaccgcgttccccacgggcgaccgtggcggtggctgcgttggcggcctgcctatgggttaacccataggacgctctaatacagacatggtgcgaagagtttattgagctggttagtatccctccggcccctgaatgcggctaatcctaactgcggagcacgtgcctccaatccagggggttgcatgtcgtaacgggtaactctgcagcggaaccgactactttgggtgtccgtgtttccttttattcttatactggctgcttatggtgacaatcgaggaattgttaccatatagctattggattggccatccggtgtctaacagagcgattatatacctctttgttggatttatgcagctcaataccaccaactttaacacattgaaatatatcttaaagttaaacacagcaaa

SEQ ID NO: 307 - RNA, 741 nt, synthetic construct
  source 1..741: mol_type = other RNA
ttaaaacagcctgtgggttgtacccacccacagggcccactgggcgctagcactctggtactacggtacctttgtgtgcctgttttatacccctccccctactgaaacttagaagcaattcataccgatcaatagtgggcgtggcacaccagccgtgtctagatcaagcactcctgtttccccggaccgagtatcaatagactgctcacgcggttgaaggagaaaacgttcgttatccggctaactacttcgaaaaacctagtaacaccatgaaagttgcggagtgtttcactcagcacttccccagtgtagatcaggtcgatgagtcaccgcattcctcacgggcgaccgtggcggtggctgcgctggcggcctgcctatggggtgacccataggacgctctaatacagacatggtgcgaagagtctattgagctagttagtagtcctccggcccctgaatgcggataatcctaactgtggagcagatacccacgaaccagtgggcagtctgtcgtaacgggcaactccgcagcggaaccgactactttgggtgtccgtgtttccttttattccaaatctggctgcttatggtgacaattgagagattgttgccatatagctattggattggccatccggtgaataatagagcgataatatatttgtttgttggattcgtgccacttagtctgaaagttttgagaacactcaactacgttttattgctgaatagtgcaag

SEQ ID NO: 308 - RNA, 741 nt, synthetic construct
  source 1..741: mol_type = other RNA
ttaaaacagcctgtgggttgttcccacccacagggcccactgggcgctagcacaccggtatcacggtacccttgtgcgcctgttttatccacctcccccgttgtaacttagaagctcaatacaaatggtcgatagccagcccgatacgccaattgggttttgaccaagcacttctgttaccccggactgagtaccaataggctgccaaagcggctgaaggggaaaacgttcgttaccccaccaactacttcgagaaacctagtaccaccatgaagattgcgcagcgtttcgctcagcacaaccccagtgtagatcaggtcgatgagtcaccgcattccccacaggcgactgtggcggtggctgcgttggcggcctgcccatggggctacccatgggacacttcaatatcgacatggtgcgaagagtctattgagctagttggtagtcctccggcccctgaatgcggataatcctaactgcggagcaggcacccacaagccagtgggcagcctgtcgtaacgggcaactctgcagcggaaccgactactttgggtgtccgtgtttctttttattcttacactggctgcttatggtgacaattgaagaattgttaccatatagctattggattggccatccagcgactaacagagctattatcttcttgtttgtggggtacgtaccactcaatttcacagtagtaaggactctcaatttcattttgtgcttgaataaggcgaa

SEQ ID NO: 309 - RNA, 744 nt, synthetic construct
  source 1..744: mol_type = other RNA
ttaaaacagcctgtgggttgtacccacctacagggcccactgggcgtcagcacactggtatcccggtacctttgtgcgcctgttttatattccccaccccacgttgtaacttagaagcaatgcaatttcggtcagtagtagacgcggcaacccagtcgtgtttcgaccaagcacttctgtaaccccggaccgagtatcaataagctgctcgcgcggctgaaggagaaaccgttcgttacccggctaactacttcgagaagcctactaacaccatgaacgttgcagagtgtttcactcagcacttcccccgtgtagatcaggtcgatgagtcaccgcgatccccacgggcgaccgtggcggtggctgcgttggcggcctgcctgtggggcaacccacaggacgctctaatacagacatggtgcgaagagcctattgagctagttagtagtcctccggcccctgaatgcggctaatcctaactgcggagcacatgcccacaaaccagtgggtggtgtgtcgtaacgggcaactctgcagcggaaccgactactttgggtgtccgtgtttctttttattctcatactggctgcttatggtgacaattgaaagattgttgccatatagctattggattagccatccggtgtcaaacagagcaattatttacctattcgttggttttgcacccttgaattttaaggttcttaaaacacttaatctcatattaaaactcaattcagcaaa

SEQ ID NO: 310 - RNA, 742 nt, synthetic construct
  source 1..742: mol_type = other RNA
ttaaaacagcctgtgggttgatcccacccacagggcccactgggcgctagcactctggtatcacggtacctttgtgcgcctgttttatacttcctcccccaactgcaacttagaagtaacacaaaccgatcaacagtcagcgtggcacaccagccacgttttgatcaaacacttctgttaccccggactgagtatcaatagactgctcacgcggttgaaggagaaaacgttcgttatccggccaactacttcgagaaacctagtaacgccatggaagttgtggagtgtttcgctcagcactaccccagtgtagatcaggttgatgagtcaccgcattccccacgggtgaccgtggcggtggctgcgttggcggcctgcccatggggaaacccatgggacgctcttatacagacatggtgcgaagagtctattgagctagttggtagtcctccggcccctgaatgcggctaatcccaactgcggagcatacactctcaagccagagggtagtgtgtcgtaatgggcaactctgcagcggaaccgactactttgggtgtccgtgtttcattttattcctatactggctgcttatggtgacaattgagagattgttaccatatagctattggattggccatccggtgactaacagagctattatatatctttttgttgggtttataccacttagcttgaaagaggttaaaactctacattacattttaatactgaacaccgcaaa

SEQ ID NO: 311 - RNA, 741 nt, synthetic construct
  source 1..741: mol_type = other RNA
ttaaaacagcctgtgggttgttcccacccacagggcccatgggcgctagcacactggtatcgtggtacctttgtgcgcctgttttatacaccctccccatttgtaacttagaagtaaagcaatattgatcaatagcaagcatggcacaccagccgtgttcagatcaagcacttctgtaaccccggactgagtatcaataggctgccaaagcggctgaaggagaaaacgttcgttaaccggccaactacttcgagaagcccagtatcaccatgaaagttgcagagcgtttcgctcagcactccccccgtgtagattaggtcgatgagtcaccgcatcccccacaggcgactgtggcggtggctgcgttggcggcctacctacggggcaacccgtaggacgctctaatacagacatggtgagaagagcctattgagctagttggtagtcctccggcccctgaatgcggataatcctaactgcggagcatgtgctcgcaatccagcgagaggcatgtcgtaacgggcaactctgcagcggaaccgactactttgggtgtccgtgtttccttttattccttgtttggctgcttatggtgacaattgaaagattgttgccatatagctattgggtcggccacctggtatctaacagagcaattatttacttgtttgttggttttgtacccttaaatctcaaggttcttgaaacccttaactacacattgaaactcaattcattgaa

SEQ ID NO: 312 - RNA, 732 nt, synthetic construct
  source 1..732: mol_type = other RNA
tgtgggttgttcccacccacagggcccactgggcgctagtacactggtaccaaggtacctttgtacgcctgttttataccccctccccgatccgaaacttagaagtaaagcaaacccgatcaatagtaggtgcgacactccagtcgtatctcgatcaagcacttctgtttccccggactgagtatcaatagactgcccacgcggttgaaggagaaaacgtccgtcatccggctaactacttcgagaaacccagtagcaccatggaagttgcagagtgtttcgctcagcactaaccccgtgtagatcaggctgatgagtcaccgcattccccacgggtgaccgtggcggtggctgcgttggcggcctgcctatggggcaacccataggacgctctaatacggacatggtgtgaagagtctattgagctagttagtaatcctccggcccctgaatgcggctaatcctaactgcggagcacatactcctactccaaggagcagtgtgtcgtaacgggcaactctgcagcggaaccgactactttgggtgtccgtgtttcctattaacatatcactggctgcttatggtgacaattgaaagattgttaccatatagctattggattggccatccggtgtcaaacagagcaatagtgtacctattcgctgggtttatcccattgactgttaaagatatacaaactctctacttgataatacaactaaacactgtaaa

SEQ ID NO: 313 - RNA, 742 nt, synthetic construct
  source 1..742: mol_type = other RNA
ttaaaacagcctgtgggttgatcccacccacagggcccattgggcgctagcactctggtatcacggtacccttgtgcgcctgttttatgtcccttccctcaactgtaacttagaagtaacgcacaccgatcaacagtcagcgtggcacaccagccatgttttgatcaagcacttctgttaccccggaccgagtatcaacagactgctcacgcggttgaaggagaaagtgttcgttatccggccaactacttcgaaaaacctagtaacaccatggaagttgcagagtgtttcgctcagcactaccccagtgtagatcaggtcgatgagtcaccgcatcccccacgggcgaccgtggcggtggctgcgttggcggcctgcctatgggggaacccataggacgctctaatacagacatggtgcgaagagtccattgagctagttggtagtcctccggcccctgaatgcggctaatcctaactgcggagcacacaccttcaagccagagggcagtgtgtcgtaacgggcaactctgcagcggaaccgactactttgggtgtccgtgtttcattttattcttatactggctgcttatggtgacaattgagagattgttaccatatagctattggattggccatccagtgactagcagagctattatatacctctttgttgggtttataccacctaatttgaaagaagttaaaacattagaattcattattaaattgaatacatttaa

SEQ ID NO: 314 - RNA, 744 nt, synthetic construct
  source 1..744: mol_type = other RNA
ttaaaacagcctgtgggttgtacccacccacagggcccactgggcgctagcacactggtatcacggtacctttgtgcgcctgttttataccccctaccccaactttaaacttagaagcaaagcaaacccgatcaatagcagatgtagcaagccagttgcatcttgatcaagtacttctgtctccccggactgagtatcaatagactgctcacgcggttgaaggagaaaacgttcgttacccgaccaactacttcgagaaacctagtaacaccatgaaagtagcagggtgtttcgatcagcacaaccccagtgtagatcaggctgatgagtcaccgcatcccccacgggcgaccgtggcggtggctgcgctggcggcctgcccatggggcaacccatgggacgctctaatatggacatggtgtgaagagtctattgagctagttggtagtcctccggcccctgaatgcggctaatcctaactgcggagcacataccccaaagccaaggggcagtgtgtcgtaacgggcaactctgcagcggaaccgactactttgggtgtccgtgtttccttttattctcaaactggctgcttatggtgacaatctcagagttgttaccatatagctattggattggccatccggtgagcaacagagcaattgtctaccaatttgttggatttattccactcaatctagcggttttcagaacattgaattatattctaaccctcaacaagacgaa

SEQ ID NO: 315 - RNA, 744 nt, synthetic construct
  source 1..744: mol_type = other RNA
tttaaaacagcctgtgggttgttcccacccacagggcccacggggcgctagcacactggtatcacggtacctttgtgcgcctgttttatatccccccccccaagtaaaccttagaagcaatacacacctggtcgacagtgggtgtgacaatccagtcacatcatgaccaagcacttctgtttccccggaccgagtatcaataggctgctcacgcggctgaaggagaaagcgttcgttacccggccagctacttcgagaagcctagtaacaccatgaaagttgcagagtgtttcgttcagcacttcccccgtgtagatcaggctgatgagtcaccgcattccccacgggcgaccgtggcggtggctgcgctggcggcctgcctatgggacaccccataggacgctctaataccgacatggtgcgaagagtctattgagctagctggtagtcctccggcccctgaatgcggctaatcccaactgcggagcacgcaccctcaaaccagagggcagcgtgtcgtaatgggcaactctgcagcggaaccgactactttgggtgtccgtgtttccttttattcttacattggctgcttatggtgacaattgagagattgttaccatatagctattggattggccatccggtgacaaacaaagctatcatatatttattcattggttacataccacttaccctgaaagagatcaagaccttgcactttatcttatcactaaacactgcaaa

SEQ ID NO: 316 - RNA, 742 nt, synthetic construct
  source 1..742: mol_type = other RNA
ttaaaacagcctgtgggttgttcccactcacagggcccactgggcgctagcacactggtatcacggtacccttgtgcgcctgttttattcaccccccccaaatgtaacttagaagcataacccaaatggtcaatagacagcccagtacaccagctgggtttcggccaagtacttctgttaccccggaccgagtatcaataggctgctcacgcggctgaaggagaaaacgttcgttatccggccaattacttcgagaaacctagtaacaccatgaaagttgcgcagtgtttcgctccgcacaaccccagtgtagatcaggtcgatgagtcaccgcgttccccacgggcgaccgtggcggtggctgcgttggcggcctgcccatggggcaacccatgggacgcttcaatactgacatggtgcgaagagtctattgagctaattggtagtcctccggcccctgaatgcggctaatcctaactgcggagcagatacccacatgccagtgggcggtctgtcgtaacgggcaactccgcagcggaaccgactactttgggtgtccgtgtttccttttattcttaatctggctgcttatggtgacaattgaaagattgttgccatatagctattggattggccatccggtgacaaacagggcgattatttatttgtttgttggttttgttccattaaactatagagttttgaatactctagaatttattataacactcaacacaacaaa

SEQ ID NO: 317 - RNA, 747 nt, synthetic construct
  source 1..747: mol_type = other RNA
tttaaaacagtcctgtgggttgttacccacccacagggcccactgggcgccagcacactggtatcacggtacctttgtgcgcctgttttatatacccttcccctactaagtaacttagaagcaattaaacaaagaccaacagtaagcacagcgcaccagctgtgtttcggtcaagcacttctgttaccccggactgagtatcaataggctactcacgtggctgaaggagaaaacgttcgttacccgaccaattacttcgagaagcctagtaacaccatggaggttgcgcggcgtttcgctccacacaaccccagtgcagatcaggtcgatgagccaccgcattccccacgggcgaccgtggcggtggctgcgttggcggcctgcccatggggcaacccatgggacgcttcaatactgacatggtgcgaagagtctattgagctaattggtagtcctccggcccctgaatgcggctaatcccaactgcggagcagatacccacgcgccagtgggcagtctgtcgtaatgggcaactctgcagcggaaccgactactttgggtgtccgtgtttcctttattcttatactggctgcttatggtgacaattgagagattgttaccatatagctattggattggccatccggtgacgagcagagctattatttacctatttgttggttttataccattgaactataaagttttaaaaaccttaaacttcatcttagtactcaatacagcaaa

SEQ ID NO: 318 - RNA, 742 nt, synthetic construct
  source 1..742: mol_type = other RNA
ttaaaacagcctgtgggttgtacccacccacagggcccattgggcgctagcacactggtattccggtacccttgtgcgcctgttttatctacccttccctactgcaacttagaagttaaacagtcacggtcgataggcggttcagtaaaccaactggatcttgaccaagcacttctgttaccccggactgagtatcaataagctgcttacgtggctgaaggagaaaacgttcgttacccggccaattacttcgagaaacctagtaccaccatgaaggttgcgcagcgtttcgctccgcacaaccccagtgtagatcaggtcgatgagtcaccgcactcctcacgggcgaccgtggcggtggctgcgctggcggcctgcccatggggcaacccatgggacgcttcaatactgacatggtgcgaagagtctattgagctaattggtaatcctccggcccctgaatgcggctaatcccaactgcggagcaggtacccacacaccagtgggcagcctgtcgtaacgggcaactctgcagcggaaccgactactttgggtgtccgtgtttccttttattcctatactggctgcttatggtgacaattgaaagattgttaccatatagctattggattggccatccagtgacaaacagagcaattgtctatctatttgtcggttttgtaccaataaatttcaaagtcctaaaaaccctcaatttcatattgttacttaacacaacaag

SEQ ID NO: 319 - RNA, 745 nt, synthetic construct
  source 1..745: mol_type = other RNA
ttaaaacagcctgtgggttgtacccacccacagggcccactgggcgctagcacactggtatcccggtacctttgtgcgcctgttttataccccctcccccatatcgtaacatagaagcaatgcactcccggtcaatagctgacgtgacaaaccagttgcgttttgaccaagcacttctgtaaccccggaccgagtatcaataagctgcttgcgcggctaaaggagaaaccgtccgttacccggctaactacttcgagaaacctagtaccaccatgaacgttgcggagtgtttcgctcagcacttcccccgtgtagatcaggtcgatgagccaccgcattccccacgggcgaccgtggcggtggctgcgttggcggcctgcctgtggggcaacccacaggacgctctaatatagacatggtgtgaagagtctattgagctagttagtagtcctccggcccctgaatgcggctaatcctaactgcggagcacatacccctaatccaaggggcagtgtgtcgtaacgggcgactctgcagcggaaccgactactttgggtgtccgtgtttccttttatcttttatattggctgcttatggtgacaattgcagagttgttaccatatagcttttggattggccatccggtgagcaatagagctgttatttatcaatttgttggattcgtcgcactcaaccacacagtctttagaacactcggatttatcttgacccttaatacgagaaa

SEQ ID NO: 320 - RNA, 743 nt, synthetic construct
  source 1..743: mol_type = other RNA
ttaaaacagcctgtgggttgatcccacccacagggcccactgggcgtcagcactctggtatcacggtacctttgtgcgcctgttttatactccctccccccaaccgtaacttagaagcagcactaactgatcaatagccagcgcggcatgccagccacgcttcgatcaagcacttctgttaccccggactgagtatcaatagactgctcacgcggttgaaggagaaaacgttcgtcatccggccaactacttcgagaaacctagtaacaccatggaagttgcggagtgtttcgctcagcactaccccagtgtagatcaggtcgatgagtcaccgcattccccacaggcgactgtggcggtggctgcgttggcggcctgcccatggggaaacccatgggacgctcttatatagacatggtgcgaagagtctattgagctagttggtagtcctccggcccctgaatgcggctaatcctaactgcggagcatacaccctcaaaccagagggcagtgtgtcgtaatgggcaactctgcagcggaaccgactactttgggtgtccgtgtttcactttatttctaaattggctgcttatggtgacaattgagagattgttaccatatagctattggattggccatccggtgaccaatagagctattatatatctctttgttgggttcataccacttagcttgaaagaggttaaaactctgcattacattatactattgaattccgcaaa

SEQ ID NO: 321 - RNA, 739 nt, synthetic construct
  source 1..739: mol_type = other RNA
ttaaaacagcctgtgggttgtacccacccacagggcccattgggcgcttgcacactggtattccggtacctttgtgcgcctgttttatacatcctacccccgtaacttagaagcaagatcacccgatcaccaggaaatgtggcaaaccagtcacattctgatcaagcacttctgtttccccggactgagtatcaataggctgttcacacggctgaaggagaaaacgttcgttacccggccaactacttcgaaaaacctagtatcaccgtgaacgttgcagagtgtttcgctcagcactttccccgtgtagatcaggtcgatgagtcaccgcattccccacgggcgaccgtggcggtggctgcgttggcggcctgcctgcggggcaacccgtaggacgctctaatacagacacggtgtgaagagtctattgagctagttggtagtcctccggcccctgaatgcggctaatcctaactgcggagcgagcgcttgtaatccaacaggtagctcgtcgtaacgggtaactctgcagcggaaccgactactttgggtgaccgtgtttccttttatttcattactggctgcttatggtgacaatcacagagttgttaccatatagctattggattggccatccggtgtcaaatagagcaattgtgtttctttttgttgggtttgtaccacttgacttgaccagctacaacactctgtgctacattgttagattgaacacagcaaa

SEQ ID NO: 322 - RNA, 745 nt, synthetic construct
  source 1..745: mol_type = other RNA
ttaaaacagcctgtgggttgcacccacccgcagggcccactgggcgctagtacactggtaccccggtacccttgtacgcctgttttatttctccctcccccaaccagtaacctagaagtaaagcaaacccgatcaatagcaggtgcgacacaccagtcgtatcttgatcaagcacttctgtaaccccgggccgagtatcaatagactgctcacgcggttgagggagaaaacgctcgttatccggctgactacttcgagaaacccagtaacaccatagaagttgcagagtgtttcgctcagcactttccccgtgtagatcaggtcgatgagtcaccgcattccccacgggtgaccgtggcggtggctgcgttggcggcctgcctatggggcaacccatgggacgctctaatacagacatggtgtgaagagtcaattgagctagtcagtattcctccggcccctgaatgcggctaatcctaactgcggagcacgtgcctccaatccagggggtggcgtgtcgtaacgggtaactctgcagcggaaccgactactttgggtgtccgtgtttccttttattcttatcttggctgcttatggtgacaattgaaggattgttaccatatagctattggattggccatccggtgactaacagagcaatcatataccaatttgttggttttataccattgaattacaaagttctaatcacccttaaattcattttaacacttaatacgtcaaa

SEQ ID NO: 323 - RNA, 742 nt, synthetic construct
  source 1..742: mol_type = other RNA
tttaaaacagcctgtgggttgttcccacccacagggcccactgggcgctagcactctggtatcacggtacccttgtgcgcctgttttatatccccaccccagtggaacattagaagcagcacacctatgatcaatagtgggcgtggcatccagtcacgttatgatcaagcacttctgtgaccccggactgagtatcaatagactgctcacgcggttgaaggagaaaacgttcgttacccggccagttacttcgagaaacccagtaacaccatgaatgttgcagagtgtttcgctcagcacttcccccgtgtagatcaggtcgatgagccactgcattccccacgggcgaccgtggcagtggctgcgttggcggcctgcctatggggtcacccataggacgctctaatactgacatggtgcgaagagtctattgagctaactggtagtcctccggcccctgaatgcggctaatcctaactgtggagcacattcccccaatccagggggcagtgtgtcgtaacgggcaactctgcagcggaaccgactactttgggtgtccgtgtttctttttattctcatattggctgcttatggtgacaattacagaattgttaccatatagctattggattggccatccggtgactaacagagcaattatttatcaattcgttggatttgtcccactcgatttcaaagcagtcaatacactctcatatatcgttacactcaacacaacaaa

SEQ ID NO: 324 - RNA, 744 nt, synthetic construct
  source 1..744: mol_type = other RNA
ttaaaacagcctgtgggttgttcccacccacagggcccaccgggcgccagcacactggtatcacggtacccttgtgcgcctgttttatccaccccttcccacagtaacttagaagcacaccatgtatacggtcaataggcggctcagtacaccaactgggccacgaccaagcacttctgttaccccggactgagtatcaataagctgctcacgcggctgaaggagaaaacgttcgttacccggccaattacttcgagaaacccagtaccaccatgaaggttgcgcagcgtttcgttccgcacaaccccagtgtagatcaggtcgatgagtcaccgcgttcctcacgggtgaccgtggcggtggctgcgttggcggcctgcccatggggcaacccatgggacgcttcaatactgacatggtgcgaagagtctattgagctaattggtagtcctccggcccctgaatgcggctaatcctaactgcggagcagatacccacaaaccagtgggcagtctgtcgtaacgggcaactctgcagcggaaccgactactttgggtgtccgtgtttccttttatccttacactggctgcttatggtgacaattgagaaattgttaccatatagctattggattggccatccggtgacaaacagagcagttgtttacctatttgttggtttcgtaccgctgaaccttaaagttctaaagaccctcaattttatcttagcacttaacacagcaaa

SEQ ID NO: 325 - RNA, 742 nt, synthetic construct
  source 1..742: mol_type = other RNA
ttaaaacagcctgtgggttgttcccacccacagggcccaccgggcgctagcacactggtattgcggtacctttgtgcgcctgttttatacacccctccttaatgtaactcagaagtacaacattaccggtcaacagatgactcagtaaaccaactgagcctcgaccaagcacttctgtttccccggaccgagtatcaataggctgctcacgcggctgaaggagaaagtgttcgttacccggccaattacttcgagaagcccagtaccaccatggaggttgcgcggcgtttcgctccgcacatccccagtgtagatcaggctgatgagtcaccgcgttccccacgggtgaccgtggcggtggctgcgctggcggcctgcccatggggtaacccatgggacgcttcaatactgacatggtgtgaagagcctattgagctaattggtagtcctccggcccctgaatgcggctaatcctaactgcggagcagatacccacacaccagcgggcagtctgtcgtaacgggcaactctgcagcggaaccgactactttgggtgtccgtgtttccttttatttttatgctggctgcttatggtgacaattgaggaattgttaccatatagctattggattggccatccagtgtccaacagagcgatcatttacctgttcgttgggttcgtaccactaaaccacaagtcactcagcacacttaattacattataactctcaacacaacaag

SEQ ID NO: 326 - RNA, 742 nt, synthetic construct
  source 1..742: mol_type = other RNA
ttaaaacagcctgtgggttgtacccacccacagggcccactgggcgctagcacactggtattacggtacccttgtgcgcctgttttatttacccctcccccacgcaacctagaagcatgacttaagcggtcaatagatggctcagtatgccaactgagttatgaccaagcacttctgttaccccggaccgagtatcaataggctgctcacgcggctgaaggagaaagtgttcgttacccggccagttacttcgagaaacctagtatcatcatgaaggttgcgaggcgtttcgctccacacgaccccggtgtagatcaggctgatgagtcaccgcattccccacgggcgaccgtggcggtggctgcgctggcggcctgcccatggggcaacccatgggacgcttcaatattgacatggtgcgaagagtctattgagctaactggtagtcctccggcccctgaatgcggctaatcctaactgcggagcagacacccacatgccagtgggcagtctgtcgtaacgggcaactctgcagcggaaccgactactttgggtgtccgtgtttccttttattcttatattggctgcttatggtgacaattgaaagattgttgccatatagctattggattggccatccagtgactaacagagcaattgtctacctgttcgttggttacgtaccactaaattataaagttttgaacacacttaattttattatagcacttaacaccttaaa

SEQ ID NO: 327 - RNA, 743 nt, synthetic construct
  source 1..743: mol_type = other RNA
ttaaaacagcctgtgggttgttcccacccacagggcccactgggcgctagcacactggtatcacggtacccttgtgcgcctgttttatacacccttcccctactgtgacttagaagcaaaacaatgatgaccaatagcaagcgcagcactccagctgtgtttcggtcaagcacttctgtttccccggactgagtatcaataggccactcacgtggccgaaggagaaaacgtccgttacccggccaattacttcgagaaacccagtaacaccatagaggttgcgcagcgtttcgctccgcactcccccagtgtagatcaggtcgatgagtcaccgcgttccccacgggcgaccgtggcggtggctgcgttggcggcctgcccatggggtaacccatgggacgcttcaatactgacatggtgcgaagagtctattgagctaattggtagtcctccggcccctgaatgcggctaatcctaactgcggagcagatacccacgctccagtgggcagtctgtcgtaacgggtaactctgcagcggaaccgactactttgggtgtccgtgtttccttttattcttatattggctgcttatggtgacaattgaaagattgttaccatatagctattggattggccatccggtgtctaatagagcaattatattcctgtttgttggttttataccactgaatatcacagtttacaagaccctcaattacatcctacgtttaaacaagacaaa

SEQ ID NO: 328 - RNA, 744 nt, synthetic construct
  source 1..744: mol_type = other RNA
ttaaaacagcctgtgggttgatcccacccacagggcccactgggcgctagcacactggtattccggtacttttgtgcgcctgttttatacacccttccccttcatgtaacttagaagtaaaacacaaacggtcaataggtagctcagcaaaccagctgagcctcggccaagcacttctgttaccccggactgagtatcaataagctgttaacacggctgaaggagaaaacgttcgttatccggccaattacttcgagaaacctagtaacaccatgaaggttgcgtagcgtttcgctccacacaaccccagtgtagatcaggtcgatgagtcaccgctctccccacgggtgaccgtggcggtggctgcgttggcggcctgcccatggagcactccatgggacgcttcaatactgacatggtgtgaagagtctattgagctaattggtagtcctccggcccctgaatgcggctaatcctaactgcggagcagacacccacacgccagtgggcagtctgtcgtaatgggcaactctgcagcggaaccgactactttgggtgtccgtgtttccttttattcttacattggctgcttatggtgacaatcaaggaattgttaccatatagctattggattggccatccggtatctaacagagcaattgtttacctcttcaccggttttgtaccattgaattgcaatagtctcaacaccctttgctatatcattaaattgaactcagcaaa

SEQ ID NO: 329 - RNA, 744 nt, synthetic construct
  source 1..744: mol_type = other RNA
tttaaaacagcctgtgggttgttcccactcacagggcccactgggcgctagcacactggtatcacggtacccttgtgcgcctgttttaccacccctttccccaaagcaatttagaagaaagactcaaccggtcaatagacagcctagtacaccaactaggccctgaccaagtacttctgtttccccggactgagtatcaataggctgcttacgcggccgaaggagaaaacgttcgttacccggccaattacttcgagaaacccagtaccaccatgaaagttgcgcagtgtttcgctccgcacaaccccagtgtagatcaggtcgatgagtcaccgcatcccccacaggtgactgtggcggtggctgcgttggcggcctgcccatggggcaacccatgggacgcttcaataccgacatggtgcgaagagtctattgagctaattggtagtcctccggcccctgaatgcggctaatcctaactgtggagcagatacccacacaccagtgggcagtctgtcgtaatgggcaactccgcagcggaaccgactactttgggtgtccgtgtttccttttattctcatattggctgcttatggtgacaattgaaaggttgttgccatatagctattggattggccacccagtgactaacagagctattgtttatttgtttgttggatttgtaccattgaattacaaggtccttaatactcttaactacatcataaacctcaatacgacgcg

SEQ ID NO: 330 - RNA, 742 nt, synthetic construct
  source 1..742: mol_type = other RNA
ttaaaacagcctgtgggttgttcccacccacagggcccactgggcgccagcacactggtatcacggtacctttgtgcgcctgttttatccacccttccccaatgtaacttagaagtaaaactagaaagatcaatagcaagcacagtatgccaactgtgttatgatcaagcacttctgttaccccggactgagtatcaataagctgctaaagcggctgaaggagaaaacgttcgttacccggccaactacttcgagaaacccagtaccaccatgaaggttgcgcagtgtttcgctccacacaatcccagtgtagatcaggtcgatgagtcaccgcgttccccacgggcgaccgtggcggtggctgcgttggcggcctgcccatgggatgacccatgggacgcttcaatactgacatggtgcgaagagtctattgagctagttggtagtcctccggcccctgaatgcggctaatcctaactgcggagcagatacccacacaccagtgggcagtctgtcgtaacgggtaactctgcagcggaaccgactactttgggtgtccgtgtttctttttatcctcaaattggctgcttatggtgacaattgataagttgttaccatatagctattggattggccatccggtgtctaacagagctattgtttatttatttgttggtttcgtgccactaaattacaaagtttttgaaactctcaacttcattttgacactcaataaagcaaa

SEQ ID NO: 331 - RNA, 742 nt, synthetic construct
  source 1..742: mol_type = other RNA
ttaaaacagcctgtgggttgttcccacccacagggcccaatgggcgccagcactctggtattacggtacctttgtgcgcctgttttatatcccctcccccaattgtaacttagaagcaacacgcaccgaccaacagtgggcgtggcacaccagccacgtcttggtcaagcacatctgtttccccggactgagtatcaatagactgctcacgcggtcgaaggagaaaacgttcgttatccggccaactacttcgagaagcccagtaacaccatgaatattgcgaagtgtttcgctcagcacactcccagtgtagatcaggtcgatgagtcaccgcattccccacgggcgaccgtggcggtggctgcgttggcggcctgcctatggggcaacccgtaggacgcttcaatatggacatggtgtgaagagtctattgagctagttggtagtcctccggcccctgaatgcggctaatcctaaccgcggagcaggcacccacaaaccagtgggcagcttgtcgtaacgggtaactctgcggcggaaccgactactttgggtgtccgtgtttccttttattcttatactggctgcttatggtgacaattgagagattgttgccatatagctattggattggccatccggtgacaaacagagcaattgtttatctatttgttggttttataccgttaagttttaaagtcctaaaaacccttaacttggtcatactactcaactcagcaaa

SEQ ID NO: 332 - RNA, 744 nt, synthetic construct
  source 1..744: mol_type = other RNA
ttaaaacagtctgtgggttgttcccacccacagggcccacgtggcgccagcacactggtatctcggtacctttgtgcgcctgttttatccaccctaaaccccgttgtaacttagaagatgagcaacactgatcaatagtgggtgcaacatgccagttgcatcacgatcaagcacttctgtatccccggactgagtatcaataggctgctcacgcggctgaaggagaaaacgttcgttatccggccagttacttcgagaaacctagtaacatcatggaggttgcgcagtgtttcgctccgcacacccccagtgtagatcaggtcgatgagtcaccgcgttccccacgggcgaccgtggcggtggctgcgttggcggcctgcccatgggataacccatgggacgcttcaatactgacatggtgtgaagagtctattgagctaactggtagtcctccggcccctgaatgcggctaatcctaactgtggagcagacacccacatgccagtgggcagtctgtcgtaacgggcaactccgcagcggaaccgactactttgggtgtccgtgtttccttttattcctatattggctgcttatggtgacaattgaaagattgttaccatatagctattggattggccatccggtgtcaaacagagcaatcatttatttgtttgttggttttatacctctgaactttaaagtgctaaagactctcaattttatattatatctcaacaaatcagg

SEQ ID NO: 333 - RNA, 742 nt, synthetic construct
  source 1..742: mol_type = other RNA
ttaaaacagcctgtgggttgttcccacccacagggcccactgggcgccagcactctggtattacggtacctttgtgcgcctgttttatatccccctccccacttgaaacttagaagtgaaacacactgatcaatagttgacatggcaagccagccatgtcttgatcaagcacctctgtttccccggacctagtatcaatagactgctcgcgcggttgaaagagaaagcgttcgttacccggctaactacttcgagaaacttagtaacaccatggaagttgcggagtgtttcgctcagcacatccccagtgtagatcaggccgatgagtcaccgcattccccacgggcgaccgtggcggtggctgcgttggcggcctgcctgtggggcaacccacaggacgctctaatacaaacatggtgcgaagagtctattgagctagttagtagtcctccggcccctgaatgcggctaatcctaactgcggagcacgtgcttccaatccaggaggtggcgtgtcgtaacgggtaactctgcagcggaaccgactactttgggtgtccgtgtttccttttattcttgcattggctgcttatggtgacaattgagagattgttaccatatagctattggattggccatccggtgacaaacagagcaattatatatctctttgttggatacattccattgaactacaaggagttaaaaaccctcaattatattctgttcttgaattccgcaag

SEQ ID NO: 334 - RNA, 742 nt, synthetic construct
  source 1..742: mol_type = other RNA
ttaaaacagcctgtgggttgttcccacccacagggcccatggggcgccagcacactggtattgcggtacctttgtgcgcctgttttattcaccctttcccaatgaaacttagaagcttaactcaaccggtcgatagacagcccagtacaccaactgggttttgaccaagtactcctgtttccccggactgagtatcaataagctgctcgcgcggctgaaggagaaaacgttcgttacccggccaattacttcgagaaacctagtaccaccatgaacgttgcgcagtgtttcgctccgcacaaccccagtgtagatcaggtcgatgagtcaccgcaatccccacgggcgaccgtggcggtggctgcgctggcggcctgcccatggggcatcccatgggacgcttcaatactgacatggtgcgaagagtctattgagctaattggtaatcctccggcccctgaatgcggctaatcctaactgcggggcagacacccacacgccagtgggcagtctgtcgtaacgggtaactccgcagcggaaccgactactttgggtgtccgtgtttccttttatctttatattggctgcttatggtgacaattgaaagattgttgccatatagctattggattggccatccggtgtctaatagagcaattatatatctctttgttggcttcatcccgttaaataaagtgagctaccagaccctgtgctatattatcaaattgaacacaataaa

SEQ ID NO: 335 - RNA, 430 nt, synthetic construct
  source 1..430: mol_type = other RNA
tttccccggaagggtctaacgctatgctgtatccacggcagaagtatgacctaccgttaaccggccatgtacttcgagaagcctagtaccattatgaaagttgattgatgttacgttccccagcaaccccagtgtagttcaggtcgatgagtctcggcatgccccacgggcgaccgtggccgtggctgcgttggcggcctgcctaccaccttatggtgtaggacgtcaagatactgacatggtgtgaagagcctattgagctacgtggtagtcctccggcccctgaatgcggctaatcctaactccggagcgtccgctagcaatcccgctagaagggcgtcgtaatgcgcaagtctggagcggaaccgactactttgggtgtccgtgtttcctgtttacttattgtttggctgcttatggtgacaactta

SEQ ID NO: 336 - RNA, 742 nt, synthetic construct
  source 1..742: mol_type = other RNA
ttaaaacagcctgtgggttgttcccacccacagggcccactgggcgccagcacactggtatcacggtacccttgtgcgcctgttttataaacccttccccaatgcaacttagaagctcaactttaccggtcaatagacagtccagtacgccaactgggcttcgatcaagcacttctgttaccccggactaagtatcaataggctgctcacgcggctgaaggagaaaacgttcgttacccggccaattacttcgagaaacccagtaacactatggaggttgcgcagtgtttcgttccacacaaccccagtgtagatcaggtcgatgagtcaccgctttccccacgggcgaccgtggcggtggctgcgttggcggcctgcccatggggcaacccatgggacgcttcaatactgacatggtgtgaagagtctattgagctaattggtattcctccggcccctgaatgcggctaatcctaactgcggagcagatactcacgagccagtgggcagtctgtcgtaacgggtaactctgcagcggaaccgactactttgggtgtccgtgtttccttttattcatatattggctgcttatggtgacaattgagagattgttaccatatagctattggattggccatccggtgactaatagagcaattgtttacctatttgttggctttgtgccgttgaactacaaggttttaaaaactattaactacatcctagtacttaacacgttgaa

SEQ ID NO: 337 - RNA, 116 nt, synthetic construct
  source 1..116: mol_type = other RNA
tttcatcataagctacttggtcttgccaaccggaagataatttggttatttgttggtttcacaaatctgcgaacctcttcactaattttattaattgtcctcaaaattcaaacagg

SEQ ID NO: 338 - RNA, 742 nt, synthetic construct
  source 1..742: mol_type = other RNA
ttaaaacagctctggggttgcacccgccccagaggcccacgtggcggctagtactccggtattgcggtacccttgtacgcctgttttatactcccttcccgtaacttagacgcacaaaaccaagttcaatagaagggggtacaaaccagtaccaccacgaacaagcacttctgtttccccggtgatgttgtatagactgcttgcgtggttgaaagcgacggatccgttatccgcttatgtacttcgagaagcccagtaccacctcggaatcttcgatgcgttgcgctcagcactcaaccccagagtgtagcttaggctgatgagtctggacatccctcaccggtgacggtggtctaggctgcgttggcggcctacctatggctaacgccatgggacgctagttgtgaacaaggtgtgaagagcctattgagctacataagaatcctccggcccctgaatgcggctaatcccaacctcggggcaggtggtcacaaaccagtgattggcctgtcgtaacgcgcaagtccgtggcggaaccgactactttgggtgtccgtgtttccttttattttattgtggctgcttatggtgacaatcacagattgttatcataaagcgaattggattggccatccggtgaaagtgagattcattatctatctgtttgctggattcgctccattgagtgtgtttactctaagtacaatttcaacagttatttcaatcagacaattgtatcata

SEQ ID NO: 339 - RNA, 747 nt, synthetic construct
  source 1..747: mol_type = other RNA
ttaaaacagctctggggttgttcccaccccagaggcccacgtggcggccagtacactggtattgcggtacctttgtacgcctgttttatactcccttcccccgtaacttagaagcacaatgtccaagttcaataggagggggtacaaaccagtaccaccacgaacaagcacttctgttcccccggtgaggctgtataggctgtttccacggctaaaagcggctgatccgttatccgctcatgtacttcgagaagcctagtatcaccttggaatcttcgatgcgttgcgctcaacactcaaccccagagtgtagcttaggtcgatgagtctggacgttcctcaccggcgacggtggtccaggctgcgttggcggcctacctgtggcccaaagccacaggacgctagttgtgaacaaggtgtgaagagcctattgagctacctgagagtcctccggcccctgaatgcggctaatcctaaccacggagcaggcagtggcaatccagcgaccagcctgtcgtaacgcgcaagttcgtggcggaaccgactactttgggtgtccgtgtttccttttatttttacaatggctgcttatggtgacaatcattgattgttatcataaagcaaattggattggccatccggtgagaatttgattattaaattactctcttgttgggattgctcctttgaaatcttgtgcactcacacctattggaattacctcattgttaagatatcatcaccact

SEQ ID NO: 340 - RNA, 747 nt, synthetic construct
  source 1..747: mol_type = other RNA
ttaaaacagctctggggttgtacccactccagaggcccacgtggcggctagcactccggtattacggtacctttgtgcgcctgttttatactcccctcccgcaacttagaagcacgaaaccaagttcaatagaagggggtacaaaccagtaccactacgaacaagcacttctgtttccccggtgacattgcatagactgctcacgcggttgaaagtgatcgatccgttacccgcttgtgtacttcgaaaagcctagtatcgccttggaatcttcgacgcgttgcgctcagcacccgaccccggggtgtggcttaggctgatgagtctggacattcctcaccggtgacggtggtctaggctgcgttggcggcctacctatggctaacgccataggacgttagatgtgaacaaggtgtgaagagcctattgagctacataagagtcctccggcccctgaatgcggctaatcctaaccacggaacaggcggtcgcgaaccagtgactggcttgtcgtaacgcgcaagtctgtggcggaaccgactactttgggtgtccgtgtttcctgttatttttatcatggctgcttatggtgacaatcagagattgttatcataaagcgaattggattggccatccggtgagtgttgtgtcaggtatacaactgtttgttggaaccactgtgttagctttacttctcatttaaccaattaatcaaaaacaatacgaggataaaacaacaatactaca

SEQ ID NO: 341 - RNA, 742 nt, synthetic construct
  source 1..742: mol_type = other RNA
ttaaaacagctctggggttgttcccaccccagaggcccacgtggcggctagtacactggtatcacggtacctttgtacgcctgttttatactccctcccccgcaacttagaagcatacaattcaagctcaataggagggggtgcaagccagcgcctccgtgggcaagcactactgtttccccggtgaggccgcatagactgttcccacggttgaaagtgtccgatccgttatccgctcatgtacttcgagaagcctagtatcgctctggaatcttcgacgcgttgcgctcagcactcaaccccggagtgtagcttgggccgatgagtctggacagtccccactggcgacagtggtccaggctgcgctggcggcccacctgtggcccaaagccacgggacgctagttgtgaacagggtgtgaagagcctattgagctacatgagagtcctccggcccctgaatgcggctaattctaaccatggagcaggcagctgcaacccagcagccagcctgtcgtaacgcgcaagtccgtggcggaaccgactactttgggtgtccgtgtttccttttattcttgaatggctgcttatggtgacaatcatagattgttatcataaagcgagttggattggccatccagtgtgaatcagattaattactcccttgtttgttggatccactcccgaaacgttttactccttaacttattgaaattgtttgaagacaggatttcagtgtcaca

SEQ ID NO: 342 - RNA, 711 nt, synthetic construct
  source 1..711: mol_type = other RNA
ttaaaacagctctggggttgttcccaccccagaggcccacgtggcggccagtactctggtattgcggtacctttgtacgcctgttttatatcccctccccaagtaactttagaagcaattcacaaagttcaatagagggggtacaaaccagtaccaccatgaacaagcacttctgtttccccggtgaagctgtatagactgttcccacggtcgaaaatggcagatccgttatccgctcacgtacttcgagaagcctagtatcatcttggaatcttcgacgcgttgcgctcagcactctaccccgagtgtagcttaggccgatgagtctgggcataccccaccggcgacggtggcccaggctgcgttggcggcctacccatggctaatgtcatgggacgctagttgtgaacaaggtgtgaagagcctattgagctacttgagagtcctccggcccctgaatgcggctaatcctaaccatggagcaagtgcccacaagccagtgggtggcttgtcgtaatgcgcaagtctatggcggaaccgactactttgggtgtccgtgtttccttttattcttattatggctgcttatggtgacaacctaagattgttgtcatatagcttttggattggccatccggtgatctttgagattaatataccttccttattacttcatagtactcatttattcattacactactgtagttaca

SEQ ID NO: 343 - RNA, 746 nt, synthetic construct
  source 1..746: mol_type = other RNA
ttaaaacagctgtggggttgttcccaccccagaggcccacgtggcggctagtactccggtatcacggtacccttgtacgcctgttttatactccctcccccgtaacttagaagcaatcaaatcaagttcaataggagggggtacaaaccagtaccaccacgaacgagcacttctgtttccccggtgaagttgcatagactgttaccacggttgaaagcgaccgatccgttatccgctcatgtacttcgagaagcctagtacctccttggaatcttcgatgcgttgcgctcagcactcaaccccggagtgtagcttaggctgatgagtctggacagccctcaccggcgacggtggtccaggctgcgttggcggcctacctgtggcccaaagccacaggacgctagttgtgaacaaggtgtgaagagcctattgagctacatgagagtcctccggcccctgaatgcggctaatcctaaccacggagcaggcgatcgcaaaccagcaattagcctgtcgtaacgcgaaagtctgtggcggaaccgactactttgggtgaccgtgtttctcttatttttattcatggctgcttatggtgacaatcatagattgttatcataaagcgagttggattggccatccggtaaaagtcaagtatatcatttacttgtttgtaggatttattcctttgaacgtccatttactcaatcttatcagagtcacattactagtaagatctcactatcaca

SEQ ID NO: 344 - RNA, 745 nt, synthetic construct
  source 1..745: mol_type = other RNA
ttaaaacagctctcgggttgttccccccccagaggcccacgtggcggccagtactccggtattacggtacccttgtacgcctgttttgtatccccttcccccgcaacttagaagttataaaccaagttcaatagaagggggtacaagccagtaccaccacgaacaagcacttctgtttccccggtgatgttgtatagactgctaacgcggttgaaaacagctgatccgttatccgcttgtgtacttcgagaagcctagtatcatcttggaatcttcgatgcgttgcgttcagcgctctaccccagagcgtagcttaggctgatgagtctgggcattccccaccggcgacggtggcccaggctgcgttggcggcctacctatggctaacgccataggacgctagttgtgaacaaggtgtgaagagcctattgagctacacaagagtcctccggcccctgaatgcggctaatcctaaccatggagcaagtgatcacaatccagtgatattcttgtcgtaacgcgcaagtccgtggcggaaccgactactttgggtgtccgtgtttccttttacttttatcatggctgcttatggtgacaatcattgattgttatcataaagcgaattggattggccatccggtgaaagtgagacttatcatctacttgtttgttggattcactccattgaacacattcactcccagtatcatttcaatagtaatcagaattagacagttgtatcaca

SEQ ID NO: 345 - RNA, 744 nt, synthetic construct
  source 1..744: mol_type = other RNA
ttaaaacagctctggggttgttcccaccccagaggcccacgtggcggccagtactccggtattgcggtacccttgtacgcctgttttacactcccttccccgtaacttagacgcaataaaccaagttcactaggaggggtgcaaaccagcaccaccacgaacaagcacttctgtttccccggtgacattgtatagactgtatccacggttgaaaacgattgatccgttatccgctcttgtacttcgagaagcctagtatcatcttggaatcttcgacgcgttgcgctcagcattcaaccccagaatgtagcttaggtcgatgagtctggacattcctcaccggtgacggtggtccaggctgcgttggcggcctacctgtgacccaaagtcacaggacgctagttgtgaacaaggtgtgaagagcctattgagctacaagagagtcctccggcccctgaatgcggctaatcctaaccacggagcaagtgctcacgaaccagtgagtggcttgtcgtaacgagcaattctgtggcggaaccgactactttgggtgtccgtgtttcctttttaactttaaatggctgcttatggtgacaatcattgattgttatcataagccgaattggattggccatccggtgaaaatcaagttgatcatttatttgtttgttggattcactccattaactcatttttcaattgacctaatacgtattgtattattagttagaaacatacatcaca

SEQ ID NO: 346 - RNA, 747 nt, synthetic construct
  source 1..747: mol_type = other RNA
ttaaaacagctctggggttgttcccaccccagaggcccacgtggcggctagtactccggtattgcggtacccttgtacgcctgttttatactcccttcccccgtaacttagaagcaatcaaacaaagttcaatagaagggggtacaaaccagtaccaccacgaacaagcacttctgtttccccggtgaagttgtatagactgtacccacggttaaaagcaattgatccgttacccgctcttgtacttcgagaagcctagtactaccttggaatcttcgatgcgttgcgctcaacactcaaccccagagtgtagcttgggctgatgagtctggacgttccccaccggcgacggtggtccaggctgcgttggcggcctacctgtggcccaaagccacaggacgctagttgtgaacaaggtgcgaagagcctattgagctacaagagagtcctccggcccctgaatgcggctaatcccaaccacggagcaggtagttgcaagccagcaatcgacctgtcgtaacgcgtaagtctgtggcggaaccgactactttgggtgtccgtgtttccttttaattttaaactggctgcttatggtgacaatcattgattgttatcataaagcgaattggattggccatccggtgagaatcagatccattatctacttgttcattggatttactccattgacaacatacacatacgaccttattagagtcaatttactattgagacatctccaccata

SEQ ID NO: 347 - RNA, 715 nt, synthetic construct
  source 1..715: mol_type = other RNA
ttaaaacagctctggggttgttcccaccccagaggcccacgtggcggctagtactctggtattacggtacctttgtacgcctgttttacactcccttccctacgcaactttagaagtttaacataaagttcaatagagggggtacaaaccagcaccaccacgaacaagcacttctgtttccccggtgaaactgcatagactgtaaccacggttgaaagcggttgatccgttatccgcttgagtacttcgagaagcctagtaccaccttggaatctccgatgcgttgcgctccacactctaccccgagtgtagcttaggccgatgagtctgggcgttccccaccggcgacggtggcccaggctgcgttggcggcctacccatggttaacgccatgggacgctagttgtgaacaaggtgtgaagagcctattgagctactcaagagtcctccggcccctgaatgcggctaatcccaaccacggagcgagtgctcacaatccagtgagtggcttgtcgtaacgcgcaagtctgtggcggaaccgactactttgggtgtccgtgtttccttttatttttactatggctgcttatggtgacaatctaggattgttatcatatagcttttggattggccatccggtgacttctaacgttcaagtagtttactcgcttaattttctaaacacattctcagttgttgaattataaacttcaca

SEQ ID NO: 348 - RNA, 744 nt, synthetic construct
  source 1..744: mol_type = other RNA
ttaaaacagctctggggttgtacccaccccagaggcccacgtggcggctagtactccggtattacggtacccttgtacgcctgttttatactccctccctcgtaacttagaagcacaaaaccaagttcaatagaagggggtgcaaaccagtaccaccacgaacaagcatttctgtttccccggtgatgttgtatagactgcccgcgcggttgaaagcaacggatccgttacccgctcaagtacttcgagaagcctagtattaccttggaatcttcgatgcgttgcgttcagcactcgaccctggagtgtagcttaggctgatgagtctggacgtccctcaccggtgacggtggtccaggctgcgttggcggcctacctatggctaacgccataggacgctagttgtgaacaaggtgtgaagagcctattgagctacttgagagtcctccggcccctgaatgcggctaatcctaaccatggagcaggcggtcacagaccagtgactagcttgtcgtaatgcgcaagtctatggcggaaccgactactttgggtgtccgtgtttccttttatttttattatggctgcttatggtgacaatcattgattgttatcataaagcgaattggattggccatccggtgaaagcgagacttactatttacttacttgttggacttaccacacttaatacatttattctaggtgtcacttgtatagcaattagaatcaaacagttgcatcata

SEQ ID NO: 349 - RNA, 713 nt, synthetic construct
  source 1..713: mol_type = other RNA
ttaaaacagctctggggttgttcccaccccagaggcccacgtggcggctagtactctggtattacggtacctttgtacgcctgttttgtatcccttcccccgtaactttagaagcttatcaaaagttcaatagcaggggtacaaaccagtacctctacgaacaagcacttctgtttccccggtgatatcacatagactgtacccacggtcaaaagtgattgatccgttatccgcttgagtacttcgagaagcctagtatcaccttggaatcttcgatgcgttgcgctcaacactctgccccgagtgtagcttaggctgatgagtctgggcactccccaccggcgacggtggcccaggctgcgttggcggcctacccatggctgatgccgtgggacgctagttgtgaacaaggtgtgaagagcctattgagctactcaagagtcctccggcccctgaatgcggctaatcctaaccacggagcaaccgctcacaacccagtgagtaggttgtcgtaatgcgtaagtctgtggcggaaccgactactttgggtgtccgtgtttccctttatattcatactggctgcttatggtgacaatttacaaattgttaccatatagctattggattggccacccagtattgtgcaatatatttgagtgtttctttcataagccttattaacatcacatttttaatcacaataaacagtgcaa

SEQ ID NO: 350 - RNA, 715 nt, synthetic construct
  source 1..715: mol_type = other RNA
ttaaaacagcctggggttgttcccaccccagaggcccacgtggcggccagtactctggtattacggtacctttgtacgcctgttttatatcccctcccctgagtaactttagaagcaattcaaaaggttcaatagagggggtacaatccagtaccaccatgaacaagcacttctgtttccccggtgaggctacataaactgtacccacggttgaaagtggctaatccgttatccgctcaagtacttcgagaagcctagtaataccttggaatcttcgacgcgttgcgctcagcactctaacccgggtgtagcttaggtcgatgagtctgggcataccccaccggtgacggtggcccaggctgcgttggcggcctacccatggctaacgccatgggacgctagttgtgaacaaggtgtgaagagcctattgagctacttgagagtcctccggcccctgaatgcggctaatcctaaccacggagcaagtgctctcaaaccagagagtggcttgtcgtaacgcgtaagtctgtggcggaaccgactactttgggtgtccgtgtttccttttatttttatcatggctgcttatggtgacaatctaagattgttatcatatagcttttggattggccatccggttgttgtttagagcgtttcatctgtgctttgtttgtttgaccagatcaatataaacactacatcctatttgttcata

SEQ ID NO: 351 - RNA, 745 nt, synthetic construct
  source 1..745: mol_type = other RNA
ttaaaacagctctggggttgttcccaccccagaggcccacgtggcggccagtactccggtattgcggtacccttgtacgcctgttttacactcccttccccggtaacttagaagtaaacaaaccaagttcaatagaagggggtacaaaccagtaccaccacgaacaagcacttctgtttccccggtgacgttgtatagactgtacccacggttgaaaacaactgatccgttatccgctcttgtacttcgagaagcccagtatcaccttggaatcttcgatgcgttgcgctcagcactcaaccccagagtgtagcttaggtcgatgagtctggacaatcctcaccggcgacggtggtccaggctgcgttggcggcctacctgtggcccaaagccacaggacgctagttgtgaacaaggtgtgaagagcctattgagctacgagagagtcctccggcccctgaatgcggctaatcccaaccacggagcaggtgatcacaagccagtgattagcctgtcgtaacgcgcaagtctgtggcggaaccgactactttgggtgtccgtgtttcctttattttattatggctgcttatggtgacaatcacagattgttatcataaagcgacttggattggccatccagtgaaaataaaacacatcatttacctgattgttggatttactccgctgactatctactcaccaggtcttattaaggttattctgttgattaggtcacaatttcaca

SEQ ID NO: 352 - RNA, 746 nt, synthetic construct
  source 1..746: mol_type = other RNA
ttaaaacagctctggggttgttcccaccccagaggcccacgtggcggccagtactccggtatcacggtacccttgtacgcctgttttatacccccttccccgcaacttagaagctttaaattcaagttcaatagaaggtggtacaaaccagtatcgccacgaacaagcacttctgttgccccggtgaaattgcataagctgtccccacggctgaaggcgattgatccgttacccgctcttgtacttcgagaagcctagtaccaccttggaattttcgatgcgttgcgctcagcactcaaccccagagtgtagcttaggctgatgagtctggacataccccaccggcgacggtggtccaggctgcgttggcggcctacctgtggcccaaagccacaggacgctagttatgaacaaggtgtgaagagcctattgagctacaagagagtcctccggcccctgaatgcggctaatcctaaccacggatcaggcgattgcaacccagcaattagcctgtcgtaatgcgcaagtctgtggcggaaccgactactttgggtgtccgtgtttctttttattcttacattggctgcttatggtgacaatcttagattgttatcataaagcaagttggattggccatccggtgaaagtcaaagttactatctatttatctgttggattttaccctaagaccactcatttacctgacttaattagaataattatactacttggaaattactatcaca

SEQ ID NO: 353 - RNA, 745 nt, synthetic construct
  source 1..745: mol_type = other RNA
ttaaaacagctctggggttgttcccaccccagaggcccacgtggcggctagtactctggtatcacggtacctttgtacgcctgttttatatcccttcccccgtaacttagaagctttgtaccaacaagttcaatagaaggggtacaaaccagtaccaccacgaacaagcacttctgtttccccggtgcgatgacatagactgtacccacggtcaaaagtcaccaatccgttacccgctttggtacttcgagacgcctagtattgccttggaattctcgatgcgttgcgctcaacactcgaccctggagtgtagcttaggctgatgagtctgggcattccccaccggtgacggtggcccaggctgcgttggcggcctacccatagctattgctatgggatgctagagttgaacaaggtgtgaagagccaattgagctactaaagagtcctccggcccctgaatgcggctaatcccaaccacggatcaagtgcgtgcaacccagcacgtagcttgtcgtaatgcgcaagtctgtggcggaaccgactactttgggtgtccgtgtttccttttatttttatcatggctgcttatggtgacaatcttggattgttatcatatagcgattggattggccatccggtgagaataaaagatattgtttatctgtttgtggcttttactccattaaacaaaaacacactttccttaattaaagtggtactattgatcagatcagcataccaca

SEQ ID NO: 354 - RNA, 653 nt, synthetic construct
  source 1..653: mol_type = other RNA
ggtaaccttgtacgcctgttttataatccccttcccccgtaacagtagaagcacaaaagcaaccgctcaatagatgccatacctccagtgtggttatgagcaagcacttctgtctccccggttgcgccctatatgctgtgcgaacggcaaaaaggggcaatatcgttacccgcttgactactacgggaaacctagtattatcttcgattgatttgagagttgcgttcagcgcccaacccccggcgtagctcaggctgatgaggctccgaacaccccacaggcgactgtgtcagagcctgcgttggcggcctgcccataccctgcggtatgggacgctcacttcatgacatggtatgaagagtctactgtgctagtcaagattcctccggcccctgaatgtggataatcctaaccactgatcctacgttcgcaatccagcgtttggtaggtcgtaatgcgcaagtcggtggcggaaccaactactttgggtgtccgtgtttcccttacttcctactgaatgcttatggtgacaattgttttgatcagttgttgccattacttgcgttcagtgtgtaattacaaaaacaagatcatcagttgttactatccctcacgttcagtgcgcaattacaaaaacaagattttctgtcata

SEQ ID NO: 355 - RNA, 635 nt, synthetic construct
  source 1..635: mol_type = other RNA
cccctaggatccactggatgttagtacactggtatcgcggtacctttgtacgcctgttttatatccccttccccgcaactttagaagtatcaaaagtaccgctcaatagccgccacgctcccagtgtggtttcgagcaagcacttctgttttcccggttgcgtcccatatgctgtgcaaacggcaaaaagggacaatatcgttacccgcttgtatactacgggaaacctagtaccgccattgattgtattgagggttgcgctcatcacctttcccggtgtagctcaggctgatgaggctcagaatcccccacaggtaactgtgtctgagcctgcgttggcggcctgccctcgccttatggcgtgggacgctcactacatgacatggtgcgaagagtctactgtgctatacaagagtcctccggcccctgaatgtggataatcctaaccactgatcccacgtacgcaaaccagcgtgtagtgggtcgtaacgcgcaagtcggtggcggaaccgactactttgggtgaccgtgtttcctttattacctattgaatgtttatggtgacaattgtttgattcagttgttaccatttgctacattcaataacctagtgtcaaaccgattgaattgctaca

SEQ ID NO: 356 - RNA, 658 nt, synthetic construct
  source 1..658: mol_type = other RNA
actctggtattgcggtacctttgtacgcctgttttatatcccttccccatgtaactttagaagcaattcacaaggttcaatagagggggtacaaaccagtaccaccacgaacaagcacttctgtttccccggtgaagctgtatagactgtccccacggtcaaaaacggcagatccgttatccgcttatgtacttcgagaagcctagtatcatcttggaatcttcgatgcgttgcgttcagcactctatcccgagtgtagcttaggtcgatgagtctgggcattccccaccggcgacggtggcccaggctgcgttggcggcctacccatggctaacgccatgggacgctagttgtgaacaaggtgtgaagagcctattgagctacatgagagtcctccggcccctgaatgcggctaatcccaaccacggagcaagtactcacaacccagtgggcagcttgtcgtaacgcgtaagtctgtggcggaaccgactactttgggtgtccgtgtttcctttttatttttgatatggctgcttatggtgacatctaagattgttatcatatagcttttggattggccatccggtgatttttgagactaaaacgcttgtttgccttatcacacaatttagtattttgttatattcatacggtcata

SEQ ID NO: 357 - RNA, 689 nt, synthetic construct
  source 1..689: mol_type = other RNA
ttcccactccagaggcccacgtggcggctagtactctggtattgcggtacctttgtacgcctgttttataccccctccccaagtaactttagaagcaattcacaaagttcaatagagggggtacaaaccagtaccaccacgaacaagcacttctgtttccccggtgaagctacatagactgtccccacggtcgaaggtggcagatccgttatccgctcaagtacttcgagaagcctagtaccaccttggaatcttcgatgcgttgcgctcagcactctaccccgagtgtagcttaggtcgatgagtctgggcatgccccaccggtgacggtggcccaggctgcgttggcggcctacccgtggctaacgccatgggacgctagttgtgaacaaggtgtgaagagcctattgagctacttgagagtcctccggcccctgaatgcggctaatcctaaccacggagcaagtgctcacaaaccagtgagtggcttgtcgtaacgcgtaagtctgtggcggaaccgactactttgggtgtccgtgtttccttttattttcattatggctgcttatggtgacaatctaagattgttatcatatagcttttggattggccatccggtgatttgaaagagatatatttaccttattgttctaccatatctaattactcatcacagccacataatcaca

SEQ ID NO: 358 - RNA, 672 nt, synthetic construct
  source 1..672: mol_type = other RNA
tttaaaacagcttgagggttgttcccaccctcaaggcctactgggcgctagtacaccggtatctcggtacccttgtacgcctgttttatcttccctccccaaaagtaactttagaagcaagtaaactcacagctcaatagccgtcgcaccgccagtgcgactatgagcaagcactcctgtttccccggttgcgtcctatatgctgtggaaacggcagaaggggacaatatcgttacccgcttatctactacgggaagcctagtaacaccattgaacactttgagggttgcgttcagcgccaaacccggcgtagctcaggccgatggggcttcggaatccccacgggtgaccgtgtcgaagcccgcgttggcggcctgcccacaccaatgggtgtgggacgctcaatttgtgacatggtgcgaagagcctactgtgctaggtgagagtcctccggcccctgaatgtggctaatcccaaccaccgaacccgtggttgcaatccagcaactagcgggccgtaatgcgcaagtcggtgacggaaccaactactttgggtgaccgtgtttcctttatctcttatattgcaattttatggtgacatttatagtatttaagtgttaccatatattgcgcaaacatattgtaataatacagagttactactgcagaaatc

SEQ ID NO: 359 - RNA, 666 nt, synthetic construct
  source 1..666: mol_type = other RNA
ttaaaaaaacttggggggtttttccccccccggggttccccgggagtccgtaccccggcatcctggggcccttgtaagccttttttataattccccccccccgcaactttagaagaaaacgaactccgagctcagtaggcgtcacgtttccagcgtgactacgagcaagcacttctgtttccccggttgcgccctatatgctgtgtgaacggcagaaaggggcaaaatcgttatccgcttgattactgcgggacgcctagtatcaccatggattgacttgagggttgcgctcagcacacccccagtgtagcttgggccgatgaggctccaaattccccacgggcgaccgtgttggagcctgcgttggcggcctacccgcgcctcacggcgtgggacgctcatttcatgacatggtgcgaagagtctactgcgctagtcaagattcctccggcccctgaatgtggctaatcctaaccactgatcctgtgagcacacaccagtgcctagcaggtcgtaatgcgcaagtcggtggcggaaccaactactttgggtgtccgtgtttcctttatttcctcattgaatgcttatggtgacaattgttgagtacagttgttaccattactgcattctgcaaatagtgaataaactacgcaacaatataacaca

SEQ ID NO: 360 - RNA, 732 nt, synthetic construct
  source 1..732: mol_type = other RNA
ttaaaacagctctggggttgttcccactcaagggcccacgtggcggctagtactctggtatctcggtacctttgtacgcctgttttaattccctccccaacgtaacttagaagcttttaaaccaaagctcaataggtggagcgcaaaccagcgctcttatgagcaagcacttctgtctccccggtgtggttgtatagactgtccccacggttgaaaacaacttatccgttaaccgctatagtacttcgagaaacctagtattgccttcggagtgttgatgcgttgcgctcagcacactaacccgtgtgtagcttgggtcgatgagtctggacgtaccccactggcgacagtggtccaggctgcgttggcggcctactcatggtgaaaaccatgagacgctagacatgaacaaggtgtgaagagtctattgagctgctatagagtcctccggcccctgaatgcggctaatcctaaccatggagcaagtgctcacaaaccagtgagttacttgtcgtaacgcgcaagtccgtggcggaaccgactactttgggtgtccgtgtttcactttttacttttatgactgctaatggtgacaatttaatattgttaccatttggcttgtcgaattgatcacataagatctatagttttgttcactgatttgctttgaaataatctcacctcaaaacctccagtacataacatttaaagagtttaaacttatttataaca

SEQ ID NO: 361 - RNA, 726 nt, synthetic construct
  source 1..726: mol_type = other RNA
ttaaaacagctctggggttgttcccaccccagaggcccacgtggcggctagtactccggtaccccggtacccttgtacgcctgttttatactccctttcccaagtaactttagaagaaataaactaatgttcaacaggagggggtacaaaccagtaccaccacgaacacacacttctgtttccccggtgaagttgcatagactgtacccacggttgaaagcgatgaatccgttacccgcttaggtacttcgagaagcctagtatcatcttggaatcttcgatgcgttgcgatcagcactctaccccgagtgtagcttgggtcgatgagtctggacaccccacaccggcgacgtggtccaggctgcgttggcggcctacccatggctagcaccatgggacgctagttgtgaacaaggtgcgaagagcctattgagctacctgagagtcctccggcccctgaatgcggctaatcccaaccacggagcaaatgctcacaatccagtgagtggtttgtcgtaatgcgcaagtctgtggcggaaccgactactttgggtgtccgtgtttccttttatttttattatggctgcttatggtgacaatctgagattgttatcatatagctattggattagccatccggtgatatcttgaaattttgccataactttttcacaaatcctacaacattacactacactttctcttgaataattgagacaactcata

SEQ ID NO: 362 - RNA, 424 nt, synthetic construct
  source 1..424: mol_type = other RNA
tttccccggtgaagttacatagattgtgcccacggtgaaagtgactgatccgttacccgctttagtacttcgagaagcctagtaacatcttggaatcttcgatgcgttgcgctcagcactcaaccccagagtgtagcttaggtcgatgagtctggacactccccaccggcgacggtggtccaggctgcgttggcggcctacctgtggcccaaagccacaggacgctagttgtgaacaaggtgtgaagagcctattgagctactaaagagtcctccggcccctgaatgcggctaatcccaaccacggagcaagtgctcacaatccagtgagtggcttgtcgtaacgagcaattctgtggcggaaccaactactttgggtgttcgtggttctttttttatcattggctgcttatggtgacaatcta

SEQ ID NO: 363 - RNA, 818 nt, synthetic construct
  source 1..818: mol_type = other RNA
ttaaaacagcctgggggttgtacccacccctggggcccacgtggcgctagtactctggttcgttagaacctttgtacgcctgttttcccctccttaaacaaattaagatctctgccaatgtggggagtagtccgactccgcaccgatacgtcgcaccagtagaccggttcgcttaggacccttctacggattggtatgagttccccaccccgtaacttagaagtactagcaaaaccgaccaataggagcgtggcacccagctgcgttaaggtcaagcacttctgtctccccggccagaaatggtcgtcacccgccctctctactacgagaagcctattaaccattgaaggcgatgaggagttgcgctccaccacaaccccagtggtagctctgagagatggggctcgcagtcacccccgtggtaacacggttgcttgcccgcgtgtgctctcgggttcggccacttggccgttcactccaactcgttgtaagtggccaagagcctattgtgctagagaggttttcctccggagccgtgaatgctgctaatcccaacctccgagcgtgtgcgcacaatccagtgttgctacgtcgtaacgcgcaagttggaggcggaacagactactttcggtactccgtgtttccttattattttatacaacaatttatggtgacattgactgatactattgagttcgcccgcttgccattgaatattgccttgtattaccttatagcatttcaaaaagccacagatctcaccctcgagctcattcactttgcagtttgtttgaatcgcatacacaagacatttgaac

SEQ ID NO: 364 - RNA, 819 nt, synthetic construct
  source 1..819: mol_type = other RNA
ttaaaacagcctgggggttgtacccacccccggggcccacgcggcgctagtactctggttcgtttagaacccttgtacgcctgtttttccccccttaaataaattaagatctctgccaatgtggggagtagtccgactccgcaccgatacgtcgcaccagcagaccggttcgcctaggacccttatgcggattggtatgagtcccccccccgaaacttagaagcacattacaaactggccaataggagcgtggtatccaaccgcgttgcggtcaagcacttctgtttccccggtcagaaatgatcgttacccgccctccccactacgagaagcctattaaccactgaaagtgatgatgagttgcgctcagccacaaccccggtggtagctctgagagatggggctcgcaccacccccgtggtgacacggttgcttgcccgcgtgtgctctcgggttcagtcgcgagactgttcactctgactcattgtaggtggccaagagcctattgtgctggggaggttttcctccggagccgtgaatgctgctaatcccaacctccgagcgtgtgcgcacaatccagtgttgctacgtcgtaacgcgtaagttggaggcggaacagactactttcggtactccgtgtttccttaattttattgttcaaatttatggtgacattgtctgacatttgtgaattcgctcgcctgccacttaatatcgctttatatcatctgatagcattccataagactacagaactcactttggaactcatcgactttgctgttttcctgaatactgttcacaaccaaacaaaacaaa

SEQ ID NO: 365 - RNA, 817 nt, synthetic construct
  source 1..817: mol_type = other RNA
ttaaaacagcctgggggttgtacccacccctggggcccacgtggcgccagtactctggtacgctagtacctttgtacgcctgttttccccacccttaaataaattaagattaccactactgaggggagtagtccgactccgctccgacactgccgcaccagtattccggtacgcttagtaccctaatacggagtagatggtatccccaccccgcaacttagaagcatgcaaacaacccgaccgataggagcgcggcatccagtcgcgtataggtcaagcacttctgtttccccggtccgaaaggatcgttacccgcccaacccactacgagaagcctagtaactggccaaacaaccgcaaagttgcgctcagccacaaccccagtggtagctctggaagatggggctcgcacctcccccgtggtaacacggttgcttgcccgcgtgtgcttccgggttcggcctagtgccgttcactttaaagttgtgtaaccagcaaagagcctattgtgctgggatggttttcctccggggccgtgaatgctgctaatcccaacctccgagcgtgtgcgcacaaaccagtgttgctacgtcgtaatgcgtaagttggaggcggaacagactactttcggtaccccgtgtttccttttattgttatttacattttatggtgacactgactgacatttgtgaatttgctcgcttgcctctcaatattgcactatattacctgattgcatttcacaacactagtaaactaacccttgaacttatcgactttgctgtttacctaagtcacttaaatcacaagtacaata

SEQ ID NO: 366 - RNA, 219 nt, synthetic construct
  source 1..219: mol_type = other RNA
cggagtagatggtattccctctcccgtaacttagaagtttgaactaaaccgaccaatagcggtggtgcaaccagcatcacaacggtcaagcacttctgtttccccggcacgtcagtgtcgttacccgcccacactactacgagaagcctagtaacttcccaatcgacagcacagttgcgttcggccacaacccctgtggtagctctggaagatggggct

SEQ ID NO: 367 - RNA, 818 nt, synthetic construct
  source 1..818: mol_type = other RNA
tttaaaacagctcgggggttgttcccactcccggggcccacgtggcgctagtactctggtacgttagtaccttgtacgcctgttttcccctccttaaacaaattaagattaccactactgaggggagtagtccgactccgctccagcactgctgcaccagtgaattggtatgattagtacctcttcacggagtagatggtattcctaccccgcaacttagaagtttattaacaaaccgaccaataggtgcacagtatccagctgtgtaacggtcaagcacttctgtttccccggtccaccaggatcgttacccgcccgacccactacgagaagcctagtaactagccaagtgactgcgaagttgcgctcaaccacaaccccagtggtagctctggaagatggggctcgcacctcccccgtggtaacacggttgcctgcccgcgtgtgcttccgggttcggccttgtgccgttcacttctacgtcatgtaactagccaagagcctattgtgctgggacggttttcctccgggaccgtgaatgctgctaatcctaacctccgagcgtgtgcgcacaatccagtgttgctacgtcgtaacgcgtaagttggaggcggaacagactactttcggtaccccgtgtttcctcttttattatattatttaatggtgacaattgcagaaatttgtgatttagcgactttaccattgcacatagcattatattgtttgattgctttccacaaaacatctgatatacccaactcttatatcgatctacttatctttctttgcttgaagaataaattaaagaaagcacg

SEQ ID NO: 368 - RNA, 818 nt, synthetic construct
  source 1..818: mol_type = other RNA
ttcaaacagcctgggggttgtacccacccctggggcccacgcggcgctagtactctggtacgttagtacctttgtacgcctgttttcccctcccttaaataaattaagattaccactactgaggggagtagtccgactccgctccgacaatgtcgcaccagtgcactggtacgctagtaccttttcacggagtagctggtattccctcccgaaacttagaagcacttaaatcaaccgaccaataggcgcgcggtagccagccgcgttacggtcaagcactcctgtttccccggtccacaaggatcgttacccgcccgacccactgcgagaaacctagtagttggccaagtggtaacgaggttgcgctcagccacaaccccagtggtagctccggaagatggggctcgcaccacccccgcggtaacgcggttgcttgcccgcgcgtgcttccgggtccggtctcgtaccgttcacctcaataccacgtaaccagcaaagagtctattgcgctgggacggttttcctccggggccgtgaatgctgctaatcccaacctccgagcgtgtgcgcacaatccagtgttgctacgtcgtaacgcgtaagttggaggcggaacagactactttcggtaccccgtgtttccctatcattccatttcattttatggtgacaattgctgagatctgtgatttggcgaccttaccactgaatattgccttatattacttggttgcattccacaaaacctctgacatacctgcttcctatatcgacctacttgttttcctcaatttaaagtatagactacaaatagcaga

SEQ ID NO: 369 - RNA, 822 nt, synthetic construct
  source 1..822: mol_type = other RNA
tttaaaacagcctgggggttgtacccacccctagggcccacgtggcgccagtactctggtacattagtacctttgtacgcctgttttcccctcccttaaataaatcaagattaccactactgaggggagtagtccgactccgctccagcaatgctgcaccagtgcactggtacgctagtaccttttcacggagtagatggtatccccaccccgaaacttagaagcatgtgatcaaatcgaccaataggcgcgcggttgccagccgcgtttcggtcaagcacttctgtttccccggtccgcaaggatcgttacccgcccgacccactgcgagaagcccagtaactggccaagcggtagcgaggttgcactcagccacaaccccagtggtagctctggaagatggggctcgcagttcccccgtggtaacacggatgcctgcccgcgtgtgcttccgggttcggtctcgtgccgttcacctcaataccgcgtaaccagtgaagagcctattgcgctgggacggttttcctccggggccgtgaatgctgctaatcctaacctctgagcgtgtgcgcacaatccagtgttgctacgtcgtaacgcgtaagtcaggggcggaacagactactttcggtaccccgtgtttccttttattttatatttatcattttatggtgacaattgctgagatttgcgatttagcggttttgccattgaacattgctttgtactacttggttgcatttcacaaaacctccgacatacccagctcctacatcgacttgcttgtttttcttaattaagacataaactagagaacacaaa

SEQ ID NO: 370 - RNA, 818 nt, synthetic construct
  source 1..818: mol_type = other RNA
ttaaaacagcctgggggttgtacccacccctagggcccacgtggcgttagtaccctggtacgctagtacctttgtacgcctgtttttccctcccttaaataaattaagattaccactactgaggggagtagaccgactccgctccagcactgctgcaccagtgaactggtacgctagtacctttgcacggagtagatggtacacccaccccgtaacttagaagtactgaacacaaccgaccaatagcggcgtgacagccagttacgcaacggtcaagcacttctgtttccccggtccgtatggatcgttacccgcccaagctactacaagaagcctattaactactgaaactgttgaaaggttgcgctcaaccacatccccagtggtagctccgagtgatggggctcgcgattcccccgtggtaacacggtcgcttgcccgcgcgcgcactcgggtccggtctttgaccgttcaccttgagacaacgtaagtagccaagagcctattgtgctggtttggttatcctccggagccgtgaatgctgctaatcctaacccccaagcgtgtgcgcacaaaccagtgttgctacgtcgtaacgcgtaagttggaggcggaacagactactttcggtactccgtgtttcctttatctcatttttaaaaactttatggtgacaattgttgtgatttgtgaactttacatctagctcttgcataacgccttgtttcatctagtcgccttccatataatatctaaagctttcaacccttgagttaactcactagcaattttgagctcaaataacctagatatagata

SEQ ID NO: 371 - RNA, 814 nt, synthetic construct
  source 1..814: mol_type = other RNA
ctaaaacagcctgcgggttgtacccgcccgcagggcccactgggcgctagtactctggtacgctagtacactagcacgttagtgcttttgtacgccagtacctttgtacgcctgttttattttcccttccccacatgtaactttagaagtttagaaacaaacaatgaccaataggagtccagcatccagttggattgcggtcaagtacttctgtttccccggacctagtagtgataggctgtacccacggccgaagatgaacccgtccgttatccggctacctacttcgggaagcctagtaacattctgaagtctctgaggcgtttcgctcagcacgaccccggtgtagatcgggctgatgggtctccgcataccccacgggtgaccgtggcggaggccgcgttggcggcccgcctatggcgaaagccataggacgcctcttagatgacagggtgtgaagagcctactgagctgggtagtagtcctccggcccctgaatgcggctaatcctaaccacggagcgtccaccggcaaaccggtcgggagggcgtcgtaacgggtaactctgtggcggaaccgactactttgggtgtccgtgtttccttttgatcctattttggctgcttatggtgacaacgataagttgttatcataaagcttttgggttggccacctggaaaaagttatcagtgtttgatattgttcggctctcacgccttccaacaaaacaggccttacttcttttaattgcattttatccatcggaggttattacagatttccatctgaagcttcttctcacagtagcagtaaa

SEQ ID NO: 372 - RNA, 809 nt, synthetic construct
  source 1..809: mol_type = other RNA
ttaaaacagcctgcgggttgttcccacccgcagggcccactgggcgctagtgcactggtatgctagtaccttggtattacggtaccattgtacgttagtacctttgcacgcctgttttaaatcccctcccccatgcaacattagaagtctatctattaaggaccaataggagtccaacagccagttggattgtggtcaagtacttctgtctccccggacttagtagtgataggctgtacccacggccgaagatgaacctgtccgttatccggccagctacttcgagaagcctagtagcaccaaagatctgtcttggcgtttcgctcagcgcgtccccccgcgtagatcgggctgatgggtctccgcatcccccacgggtgaccgtggcggaggccgcgtggcggcccgcctatggcgaaagccataggacgccatttcagtgacagggtgtgaagagcctattgagctagttggtagtcctccggcccctgaatgcggctaatcctaaccacggagcgtccaccggcaaaccagctgggagggcgtcgtaacgggtaactctgtggcggaaccgactactttgggtgtccgtgtttccttttgatcctattgtggctgcttatggtgacaacttacagttgttatcataaagcttttggattggccatccggaaagagttaacagtttgttcgctcattgctctctcaaagtttccattaaggaaagcaatttaccttcttatttcattttacaggcttgacaagatttcaagcgctcatatagatctgcttattcagctacatcaaac

SEQ ID NO: 373 - RNA, 811 nt, synthetic construct
  source 1..811: mol_type = other RNA
ttaaaacagcctgtgggttgttaccacccacaggcgccacggggcgcttcgcacctgggatgcttaacgtcggatttgcggatccgatgtttattgcccctgtgcgcgcctgttatattcccttcccccttaagtaactttagaagtttataataacaaagaccaataggagtccaacatccagttggatcgcggtcaggcacttctgtctccccggacctagtagtgataggctgtacccacggccgaagatgaacccgtccgttatccggccagctacttcgagaagcctagtaacatcaaagatctgtcctggcgtttcgctcagcgcgtttccccccgcgtagatcgggctgatgggtctccgcataccccacgggcgaccgtggcggaggccgcgtggcggcccgcctatggcgaaagccataggacgccatttcagtgacagggtgtgaagagcctattgagctagttggtagtcctccggcccctgaatgcggctaatcctaaccacggagcgtccaccagcaaaccagctggaagggcgtcgtaacgggtaactctgtggcggaaccgactactttgggtgtccgtgtttccttttgatcctattgtggctgcttatggtgacaacttacagttgttatcataaagcttttggattggccatccggaaagagttaacagtttgttcgcttattgctctctcaaaacttccattgaggaaagcaatttatcttctcatttcattttacaagcttgataaaatttcaagtgctcatttagagttactcatccaactccatcaaat

SEQ ID NO: 374 - RNA, 815 nt, synthetic construct
  source 1..815: mol_type = other RNA
taaacagtcagggggttgtacccacctccggggcccacgtggcgtcagtgctctggtgcgttagtacctttgcacgcctgttttcccttcccttaaacaaattaagatcgccagcgccgaggggagtagtccgactccgctccactacggtgctccagtggattgctattacggtagctcttcacggggtggctggtgtccccaaccccgcaacttagaagccagcacagatcgaccaatagcggctcggcagccagtcgggcaacggtcaagcacttctgtttccccggtccgtaaggatcgttacccgcccaggatgctacgagaaacttagtaaacacccaagcttgtgagaggttgcgctcagccacaaccccagtggtagctctgagtgatggggctcgtgactacccctctggtaacagagacacttgcccgcgtgtgcactcgggttcatcagaaatggtgttcacctcgaccaagcgtaagtgttgaagagtctattgtgccagcctggtttcctccggggccgtgaatgctgctaatcctaacctccgagcgtgtgcgcacaatccagtgttgctacgtcgtaacgcgtaagttggaggcggaacagactactttcggtaccccgtgtttcctcattcattatttcaatttatggtgacaattacagagatttgtgaattggcgaaactaccactgaatttggccttgtattgtcttattgccttccacaaaacttctgatattccacccagttatatcgatctcctggtttatctaaatttacaatataaattgaaccagataca

SEQ ID NO: 375 - RNA, 811 nt, synthetic construct
  source 1..811: mol_type = other RNA
ttaaaacagcctgtgggttgttcccacccacagggcccactgggcgctagtacactggtatgccttacctcggtatcacggtaccgttgtatacagtacctttgtacgcctgttttaaatcccctccccccaatgtaactttagaagtttaagcaaacaaagaccaataggagtccaacaaccagttggattgcggtcaagcacttctgtctccccggacctagtagtgataggctgtacccacggccgaagatgaaaccgtccgttacccggccagctacttcgagaagcctagtaacatcaaagatctgtcttggcgtttcgctcagcgcgttccccccgcgtagatcgggctgatgggtctccgcataccccacgggcgaccgtggcggaggccgcgtggcggcccgcctatggcgaaagccataggacgccatttcagtgacagggtgtgaagagcctattgagctagttggtagtcctccggcccctgaatgcggctaatcctaaccacggagcgtccaccagcaaaccagctggcagggcgtcgtaacgggtaactctgtggcggaaccgactactttgggtgtccgtgtttccttttgatcctatattggctgcttatggtgacaacgataagttgttatcataaagcttttgggttggccacctggaaaaagttatcagtgtttgatattgttcggctttcacgcctaccaataaaacaatccttatattatttgatttccttttatccacaagaggaaatttctgagtttcatctccagttgctcttaaccttatcagcaag

SEQ ID NO: 376 - RNA, 774 nt, synthetic construct
  source 1..774: mol_type = other RNA
tattttccaggtggaatggggatgcaggcctgagttgtttttgcccccaaggaataaatcaatattcccagagccgaggggagtagtccgactccgctccactacggtgctccagtagattgctattgcggtagctctctacggggtggctggtattcctcaccctgaaacttagaagtttgtacacaccgaccaatagcggtctggcagccagccaggcaacggtcaagcacttctgtttccccggtccgcaaggatcgttacccgcccgaattgctacgaaaagcctagtaagtacccaagtttgtgcgaggttgcgttcagccacaatcccagtggtagctctgagtgatggggctcgtgattacccctctggtgacagagacacttgcccgcgcgtgcacttgggttcaccagaaatggtgttcacctcaatcaagcgcaagtactgaagagccaattgtgccaatttggtctcctccggggccgtgaatgctgctaatcctaacctccgagcgtgtgcgcacaatccagtgttgctacgtcgtaacgcgtaagttggaggcggaacagactactttcggtaccccgtgtttccttattttattcatttaaatttatggtgacaattgttgagatttgtgagctagcaaaattaccattgaatttggcattgtactgtctcattgcttttcacaaaacctcagatatcccacccagttacattgatcttttagttcatttgaatttacagttcaaactgagacaagtaaa

SEQ ID NO: 377 - RNA, 716 nt, synthetic construct
  source 1..716: mol_type = other RNA
tacctttgtacgcctgttttatactcccttcccctacatgtaaccttagaagtataaataaacaaagaccaataggagtccaacatccagttggatcgcggtcaagtacttctgtttccccggacctagtagtgataggctgtacccacggccgaagatgaacccgtccgttatccggccagctacttcgagaagcctagtaacatcaaagatctgtcttggcgtttcgctcagcgcgttccccccgcgtagatcgggctgatgggtctccgcataccccacgggcgaccgtggcggaggccgcgtggcggcccgcctatggcgaaagccataggacgccatttcagtgacagggtgtgaagagcctattgagctagttggtagtcctccggcccctgaatgcggctaatcctaaccacggagcgttcaccagcaaaccagctgggagggcgtcgtaatgggcaactctgtggcggaaccgactactttgggtgtccgtgtttccttttgatcctatattggctgcttatggtgacaacgataagttgttatcataaagcttttgggttggccacctggaaaaagttatcagtgtttgatattgttcggctttcacgcctaccaataaaacaagctttatattatttaatctccttttacccaaagggagagatttctgaatttcatatccagttgctcctaacactatcagcaaa

SEQ ID NO: 378 - RNA, 705 nt, synthetic construct
  source 1..705: mol_type = other RNA
gcctgttttatattcccctcccccaaacgtaacattagaagtataaacaaacaaagaccaataggagtccaacatccagttggattgcggtcaagcacttctgtctccccggacctagtagtgataggctgtacccacggccgaagatgaacccgtccgttatccggccagctacttcgagaagcctagtaacatcaaagatctgtcttggcgtttcgctcagcgcgttccccccgcgtagatcgggctgatgggtctccgcataccccacgggcgaccgtggcggaggccgcgtggcggcctgcctatggcgaaagccataggacgccatttcagtgacagggtgtgaagagcctattgagctagttggtagtcctccggcccctgaatgcggctaatcctaaccacggagcatccaccagcaaaccagctggaagggtgtcgtaacgggtaactctgtggcggaaccgactactttgggtgtccgtgtttccttttgatcctatattggctgcttatggtgacaacgataagttgttatcataaagcttttgggttggccacctggaaaaagttatcagtgtttgatattgttcggctttcacgcctaccaataaaacaagctttatacttgctaatttcattttatccatctgaggatattactgaattttacctacaacttttgctcaccctaacagtaaa

SEQ ID NO: 379 - RNA, 798 nt, synthetic construct
  source 1..798: mol_type = other RNA
gggttgttcccacccgcggggcccactgggcgctagtacactggtacgccagtaccttggtattacggtaccattgtacgtcagtacctttgtacgcctgttttatatcccttcccccacatgtaacattagaagtcaagtaaacaaagaccaataggagcccaacaaccagttgggttgcggtcaagcacttctgtctccccggacctagtagtgataggctgtacccacggccgaagatgaacccgtccgttatccggccagctacttcgagaagcctagtaacatcaaagatctgtcttggcgtttcgctcagcgcgttccccccgcgtagatcgggctgatgggtctccgcataccccacgggcgaccgtggcggaggccgcgtggcggcccgcctatggcgaaagccataggacgccatttcagtgacagggtgtgaagagcctattgagctagttggtagtcctccggcccctgaatgcggctaatcctaaccacggagcatccaccagcaaaccagctgggagggtgtcgtaacgggtaactctgtggcggaaccgactactttgggtgtccgtgtttccttttgatcctattttggctgcttatggtgacaacgataagttgttatcataaagcttttgggttggccacctggaaaaaattgtcagtgtttgatatcgctcggctttcacgcctaccagtcaaacaagctctttatctccttgttggattctactcaataaaggacataactcagtttcacataaatctgttgctttcattgtcagcaaa

SEQ ID NO: 380 - RNA, 812 nt, synthetic construct
  source 1..812: mol_type = other RNA
ttaaaacagcctgtgggttgttcccacccgcagggcccactgggcgctagtacactggtatgccagtacattagtacgctagtactcttgtatgccagtacctttgtacgcctgttttatactcccctccccatatgtaacattagaagtttaagtaataaagaccaataggagtccaacatccagttggattacggtcaagcacttctgtttccccggacctagtagtgataggctgtacccacggccgaagatgaacccgtccgttatccggccagctacttcgagaagcctagtaacatcaaagatctgtcttggcgtttcgctcagcgcgttccccccgcgtagatcgggctgatgggtctccgcataccccacgggtgaccgtggcggaggccgcgtggcggcccgcctatggcgaaagccataggacgccatttcagtgacagggtgtgaagagcctattgagctagttggtagtcctccggcccctgaatgcggctaatcctaaccacggagcgtccaccaacaatccagttggcagggcgtcgtaacgggtaactctgtggcggaaccgactactttgggtgtccgtgtttccttttgatcctatattggctgcttatggtgacaacgataagttgttatcataaagcttttgggttggccacctggaaaaagttgtcagtgtttgatattgttcggctttcacgcctaccaataaagcaagctttatatttgttagtttcattttatccattaaaggatattaccgaatttcacttacagcttttgctcacattatcagcaaa

SEQ ID NO: 381 - RNA, 821 nt, synthetic construct
  source 1..821: mol_type = other RNA
tttaaaaccaacccgggggttgtacccacccctggggcccacgtggcggtagtgctttggtttgctcagaacctttgcacgcctgttttcccttcccttaaataaattaagcttgccgggactgaggggagtactccgacttcgctcccctacggtgccccagtaaactggtatcgcggtacctttttacggagtcaccggcaccccccccccgcaacttagaagtttgaacacaaaccgaccaatagaggcccggcatccagtcgagcaacggtcaagcacttctgtttccccggtccgcaaggatcgttacccgccccgactactacgggaagcctagtatctagccaaacttggaaaaggttgcgctcagccacaaccccagtggtagctctgagtgatggggctcgcgacaacccccttggtaacaaggacgcttgcccgcgcgtgcactcgggttcaccttccggtgttcaccctgaccaagtgtaactagagaagcgcctactgtgctagttgggttttcctccggggccgtgaatgctgctaatcccaacctccgagcgtgtgcgcacaatccagtgttgctacgtcgtaacgcgcaagttggaggcggaacagactactttcggtaccccgtgtttcctttatttgtttattaaatttatggtgacaattgttgagatttgtgatttagcgaaattacccttgaatttggcattatattacttggttgcatttcacaaaacctcaaagattcccgcatcctatatagatcttctcgtctatttgaacttacagcacaaattaaatcaaataaa

SEQ ID NO: 382 - RNA, 847 nt, synthetic construct
  source 1..847: mol_type = other RNA
ttaaaacagcctgggggttgttcccacccccagggcccacgtggcgcaagtactctgcttcgttagaagccttgtacgcctgttttcccctccttaaataaattaagattaccacttccgaggggagtagtccgactccgctccgatacgtcgctccagtgcgctagtacgcttagtactttctcacggggatagtggtacccctccctagtaatttagaagacttgaaaaaccgaccaataggcacctcgcatccagcggggtaaaggtcaagcacttctgtttccccgggtcgagtagcgatagactgtgcccacggtcgaaggtgaaacaacccgttatccgactttgtacttcgggaagcctagtaccaccaaagattatgcttggggtttcgctcagcacgaccctggtgtagatcaggctgatggatcaccgcgttcctcacaggcgactgtggcggtggtcgcgtggcagcctgccgatggggcaacccatcggacgccaagcatatgacagggtgtgaagagcctactgagctacaaagtattcctccggcccctgaatgcggctaatcccaaccacggagcatttgctaccaaaccaggtagtggaatgtcgtaacgggtaactctgtggcggaaccgactactttgggtgtccgtgtttccttttaatttatcattctgtgtatggtgacaactatagtgctatctcgatttgcattactattgttgagattgacactttattacattgttgcattttaccctttgagtgagttttcacctgaacagattaatttacttatcctgtttatatatcacaagcagaaatacttgcaaag

SEQ ID NO: 383 - RNA, 716 nt, synthetic construct
  source 1..716: mol_type = other RNA
aaaatagcctcagggttgttcccaccctgagggcccacgtggcgtagtactctggtatcacggtacctttgtacgcctattttacatcccttccccgtaacttagaagctttcaactataagttcactagcagggctaccaaccaggtagttcatcgaacaagcacttctgttaccccggtcctagtacctgagaagctgtacccacggcggaaggggaaaaagatcgttacccggctatctacttcgagaagcctagtaacgtcattgaaactcttgagcgttgcgttcagcacagtaccccctgtgtagctttggctgatgagtctgggcattccccactggcgacagtggcccaggctgcgttggcggccaaccgatccgggcaaccgggtcggacgctcatttgtggacatggtgtgaagagcctattgagctaggtagtagtcctccggcccctgaatgcggctaatcccaactccggagcaagtgcgcacaatccagtgtgtggcttgtcgtaatgcgtaagtctggagcggaaccgactactttgggtgtccgtgtttcctgtttttccttatttggctgcttatggtgacaatctagtgttgttaccatatagcgattggattggccatccggtgaatagctttgtgacaattccctacgttatttttcataactcaacttcacgagagtcattgagtttgactaatt

SEQ ID NO: 384 - RNA, 862 nt, synthetic construct
  source 1..862: mol_type = other RNA
ttaaaagagcctgggggtgactccagcccccaggacccacgtggtgccagcactacttagttacgattatttagtgcgcctcttttatatcccctcccccacccttcccttttccttgaattctttcgtaacaagtgcctcagcatgacgtttgcacggtgtactgtaaccatcaggcaaccagcctgtaaagcaggaagcacttctgtttccccggtgtggatattaggctgttcccacggccgaaaatgaagcatcgttatccccactggtactgcgcgaaagctagtaacaccaatgatttagatggatctttcgctcagcaattgccccgattgtagatcgggcggatggggctcctcgttcctcactggcgacagtggaggagcccgcgtggccgcccgcctaccccgcatggggtaggaggtccagataatgacagggtgtgaagactcaagtgcgctaccagtgcatcctccaggcctctgaatgcggctaatcctaaccccggagcacccgctcacagtccagtaagtagggtgtcgtaacgcgtaagtctgggatggaaccgactactttgagtgacctgtgtttcttttatttttattgaggttgtttatggtgacaaagattggctctatcgtgtatagagtttacaaggtgaaagaggatttttacagacttttgttatcaatcttgtcctatcctacccgcaggggaattgatgatagaagtgcttttagaggtgattcaattgatagctcaaacaactgagaatcttatttatttttatcaaggtctgaatttgaataaagatccagtgaattttacccccacctattagcgaccaaattcacaagca

SEQ ID NO: 385 - RNA, 622 nt, synthetic construct
  source 1..622: mol_type = other RNA
ttaaaactgggtgtgggttgttcccactcacaccacccaatgggtgttgtactctgttattccggtaactttgtacgccattttccctccctccccatccttttacgtaacttacaacttttaaacacaagaccaatagtaggcaactctccaggttgtctaaggtcaagcacttctgtttccccggttgacgttgatatgctctaacagggcaaaaacaactgatatcgttacccgcaaagtgcctacacagagcttagtaggattctgaaagatctttggttggtcgctcagctgcatacccagcagtagaccttgcagatgaggctggacattccccactggtaacagtggtccagcctgcgtggctgcctgcacactcttatgaggtgtgaagccaaagattggacagggtgtgaagagccgcgtgtgctcactttgagtcctccggcccctgaatgcggctaaccttaaacctgcagccatggctcataaaccaatgagcttatggtcgtaatgagcaattgcgggatgggaccgactactttgggtgtccgtgtttcactttttcctttatcaattgcttatggtgacaatatatacatagatatatattggcatc

SEQ ID NO: 386 - RNA, 610 nt, synthetic construct
  source 1..610: mol_type = other RNA
ttaaaactggatccaggttgttcccacctggatttcccacagggagtggtactctgttattacggtaactttgtacgccagttttatctcccttcccccatgtaacttagaagtttttcacaaagaccaatagccggtaatcagccagattactgaaggtcaagcacttctgtttccccggtcaatgttgatatgctccaacagggcaaaaacaactgcgatcgttaaccgcaaagcgcctacgcaaagcttagtagcatctttgaaatcgtttggctggtcgatccgccatttcccctggtagacctggcagatgaggctagaaataccccactggcgacagtgttctagcctgcgtggctgcctgcacaccctatgggtgtgaagccaaacaatggacaaggtgtgaagagccccgtgtgctcgctttgagtcctccggcccctgaatgtggctaaccttaaccctgcagctagagcacgtaacccaatgtgtatctagtcgtaatgagcaattgcgggatgggaccaactactttgggtgtccgtgtttcactttttcctttatatttgcttatggtgacaatatatacaatatatatattggcacc

SEQ ID NO: 387 - RNA, 618 nt, synthetic construct
  source 1..618: mol_type = other RNA
ttaaaactgggagtgggtgttcccactcactccacccacgtggtgctgtacactgttattccggtaactttgtacgccagtttttccctcccttccctcattatgtaacttagaagcatgaacatatggaccaataggcaataatcatccagattattgaaggtcaagcacttctgtttccccggtcaataaagatatgctttacccaaggcaaaaacttttgagatcgttacccgcacatcaactacgcaaagcctagtatcacctttgatgtactaagactggtcgtttcctgcaaccccagcagtagacctggcagatgaggctggacgtaccccactggcgacagtggtccagcctgcgtggctgcctgctcgcccatatgggcgagaagccttattattgacaaggtgtgaagagccgcgtgtgcttggtgtgagtcctccggcccctgaatgtggctaaccttaaccctgcagccattgctcataatccaatgagttagtggtcgtaatgcgcaagtgcgggatgggaccaactactttgggtgtccgtgtttcttattttttctttcatgtgtgttatatggtgacaatttatagtatataagttgtcatc

SEQ ID NO: 388 - RNA, 606 nt, synthetic construct
  source 1..606: mol_type = other RNA
ttaaaactgggttcaggttgttcccatctgaacttcccacgtggagtagtacactattattacggtaattttgtacgccagttttacctccctccccaaatgtaacttagaagatgtacacaacgaccaacaggcggtggttatccaaaccatcaaaggtcaagcacttctgtttccccggtcaatgttgatatgctccaacagggcaaaaacaactgcgatcgttatccgcaagatgcctacgcaaagcttagtaacactttggaagatttatggctggtcgttccactataccccatagtagacctggcagatgaggctagaaataccccactggtgacagtgttctagcctgcgtggctgcctgcgcaccctatgggtgcgaagccatacattggacaaggtgtgaagagccccgtgtgctcatcttgagtcctccggcccctgaatgtggctaaccttaaccccgcagccagtgcacacaatccagtgtgtttttggtcgtaatgagtaattgtgggatgggaccaactactttgggtgtccgtgtttcactttttcctttattatgcttatggtgacaatatatacatatatattgacacc

SEQ ID NO: 389 - RNA, 611 nt, synthetic construct
  source 1..611: mol_type = other RNA
ttaaaactggatctgggttgttcccactcagatctcccacgtggagtagtacactattattacggtaatcttgtacgccagttttataatccccttacccaagtaacttagaagataaacacaaagaccaataggagatgatcatccagatcatcataggtcaagcacttctgtttccccggtcaaggttgatatgctctaacagggcaaaaacagctgagatcgttatccgcaaagcgcctacgcaaagcctagtaactatctggaagttgcttggttggtcgctccgccatatcccatggtagacctggcagatgaggctagaaattccccactggtgacagtgttctagcctgcgtggctgcctgcacaccctctgggtgtgaaaccaagtaatggacagggtgtgaagagccccgtgtgctcgctttgagtcctccggcccctgaatgtggctaaccttaaccctgcagctagggcacacaatccagtgtgtatctagtcgtaatgagcaattgcgggatgggaccaactactttgggtgtccgtgtttcttgtttttcttttatgtttgcttatggtgacaatatatagtaatatatattggcatc

SEQ ID NO: 390 - RNA, 608 nt, synthetic construct
  source 1..608: mol_type = other RNA
ttaaaactggatccagattgttcccatctggatttcccacgtggagttgtacactattattccggtaattttgtacgccagttttatgtacccccccctgtaacttagaagttttgaacaaggaccaataggcagtaaccacccaggttgctaaaggtcaagcacttctgtttccccggtcaaagttgatatgctccaacagggcaaaaacaactgagatcgttacccgcaaggtgcctacgcaaagcctagtaaccccttgaacgatgtgtggttggtcgttcggctgtaccccacagtagacctggcagatgaggctagatgttccccactggcgacagtgttctagcctgcgtggctgcctgcgcactctctgagtgcgaagccatacatttgacaaggtgtgaagagccccgtgtgctcaccttgagtcctccggcccctgaatgtggctaaccttaaccctgcagctagtacatgcaatccagcatgcagctagtcgtaacgagcaattgcgggacgggaccaactactttgggtgtccgtgtttcactttttccttttatatttgcttatggtgacaatatatagatttatatattgtcacc

SEQ ID NO: 391 - RNA, 618 nt, synthetic construct
  source 1..618: mol_type = other RNA
ttcaaactggatccaggttgttcccacctggatctcccacgtggagttgtactctattattccggtaattttgtatgccagttttatctccccttcccttttgtaacttagaagatgaactcaccgaccaataggtggcatttatccagaatgtcaaaggtcaagcaccttctgtttccccggtcaaagttgatatgctccaacagggcaaaaacatctgcgatcgttatccgcaaagcaactacgcaaagcctagtatcacttttgagagtatgtggttggtcgctccactataaacccaatagtagacctggcagatgaggctagaagtcccccactggtaacagtgttctagcctgcgtggctgcctgcgtgcctctggtaggcacgaagccatatatttgacaaggtgtgaagagccccgtgtgcttgctttgagtcctccggcccctgaatgtggctaaccttaaccctgcagctagtgtgcataatccaatgcatggctagtcgtaatgagcaattgcgggatgggaccaactactttgggtgtccgtgtttctcatttttccttttatttgcttatggtgacaatatatataatacatatatattggcatc

SEQ ID NO: 392 - RNA, 613 nt, synthetic construct
  source 1..613: mol_type = other RNA
ttcaaactgggttgtggttgatcccaccacaactgctcactgagcgtagtgctctcatattccggtatgcttgcacgccagttttactcccctcccctcattgtaacttagaagcaaagcacacctgatcaataggagataacttgccaggttatctaagatcaagcacttctgtttccccggcaagtgtgaatatgctttacccaaggcaaaagctgatcttgtcgttatccgcaaggtgcctacgagaagcctagtaatgctcaagatgtggtttgactggtcgctccgctgttccccacagtagacctggcagatgaggctggacattccccaccagcgatggtggtccagcctgcgtggctgcctgcacaccctatgggtgtgaagccaaatttactgacagggtgtgaagagcctattgtgctcaccttgattcctccggcccctgaatgtggctaatcctaaccccgctgctattgcacacgaaccagtgtgtagatagtcgtaatgagcaatagtgggatggaaccaactactttgggtgtccgtgtttcttgtttttctttatttgtcttatggtcacaatatatatataacgtatattgtgatc

SEQ ID NO: 393 - RNA, 615 nt, synthetic construct
  source 1..615: mol_type = other RNA
ttaaaactgggttcgggttgttcccacccaaaccacccacgtggtgtagtacactgttatcccggtaactttgtacgccagttttatctccccacccccttttgtaacttagaagttatgcacaatgaccaatagtgggcaatcatccagattgtcatcggtcgagcactcctgtttccccggttcaagttgatatgctctaacagggcaaaaacaatttgaatcgttacccgcaaggtgcctacacagaacttagtaccattctggaaaattcttggctggtcgctcagttactaccccagtaatagacctggcagatggggctagaagttccccactggcgacagtgttctagcctgcgtggctgcctgcacacccttcttgggtgtgaagcctagaattggacagggtgtgaagagtcgcgtgtgctcatcttgagtcctccggcccctgaatgcggctaaccctaaccctgcagccattgcccacaacccagtgggtctatggtcgtaatgagcaattgcgggatgggaccgactactttgggtgtccgtgtttcactttttacttattatttgcttatggtgacaatatatagatacatatattgacacc

SEQ ID NO: 394 - RNA, 615 nt, synthetic construct
  source 1..615: mol_type = other RNA
ttaaaactgggttcaggttgatcccacctgaacctcccaagcggagtagtactctgttatttcggtaactttgtacgccagttttatatccccctccccatgtaacttagaagatgagctcacagaccaatagccggcaatcatccagattgtcaatggtcaagcacttctgtttccccggtcaacgttgatatgctccaacagggcaaaaacaactgagatcgttatccgcaaagtgcctacgcaaagcctagtaatgctttcgaagtcatttggttggtcgctccgctgtaacccacagtagacctggcagatgaggctagaaactccccactggcgacagtgttctagcctgcgtggctgcctgcacaccctttgggtgtgaagccaaattacggacaaggtgtgaagagccccgtgtgctcactttgagtcctccggcccctgaatgtggctaaccttaaccctgcagctagagtgcacaatccagtgtatttctagtcgtaatgagcaattgcgggatgggaccaactactttgggtgtccgtgtttcactttctttttttatcttttatttgcttatggtgacaatatattgaattatatattgacacc

SEQ ID NO: 395 - RNA, 625 nt, synthetic construct
  source 1..625: mol_type = other RNA
ttaaaactggatctgggttgttcccacccagatcacctacatggtgttgtacactattattacggtaatcttgtacgccagttttatactccctttcccaaatgtaacttagaagcaaagcaaactgatcaataggggacaatcatccagattgtcaaagatcaagcacttctgtttccccggtcaaagttgatatgctccacaagggcaaaaacaactgagatcgttatccgcaagatgcctacgcaaagcctagtaatacattgaaagatacttggttggtcgctcagctgttaacccaacagtagacctggtagatgaggctagagattcccctccggcgacggagttctagcctgcgtggctgcctgcacacccactgggtgtgaagccaagtattggacaaggtgtgaagagccgcgtgtgctcatcttgagtcctccggcccctgaatgtggctaaccttaaacctgcagccagtgcacacaatccagtgtgtagctggtcgtaatgagcaattgcgggatgggaccaactactttgggtgtccgtgtccgtgtttcactttttttccttttattattgcttatggtgacaatatatatagcatatatatattgttatc

SEQ ID NO: 396 - RNA, 611 nt, synthetic construct
  source 1..611: mol_type = other RNA
ttaaaactgaatccaggttgttcccacctggatttcccatgtggagtagtacactgttattccggtaactttgtacgccagttttataaccccttccccttatgtaacttagaagataagcacaaagaccaataggtggtggctatcccagtcactaaaggtcaagcacttctgtttccccggtcaacgttgatatgctccaccagggcaaaaacaaccgagatcgttatccgcaaagtgcctacgcaaagcctagtagcactttgaatagcatgtggttggtcgctccactattccccatagtagacctggcagatgaggctagaaatcccccactggcgacagtgttctagcctgcgtggctgcctgcgtgtcctaacggacacgaagccatatgtttgacaaggtgtgaagagccccgtgtgctcactttgagtcctccggcccccgaatgtggctaaccttaaccctgcagctggggcatacaatccagtgtgaactcagtcgtaatgagcaattgcgggatgggaccaactactttgggtgtccgtgtttcacttttttttataatgcttatggtgacaatatataataatttgtatattggcacc

SEQ ID NO: 397 - RNA, 614 nt, synthetic construct
  source 1..614: mol_type = other RNA
ttaaaactggatctgggttgttcccacccagatcatccacgtgatgttgtgctctattattccggtaattttgcacgccagtttttcatcccttccccctttgtaacttagaagacttaaacaaatgaccaataggaagcaacaaaccagttgcgataggtcaagcacttctgtttccccggtcaatgttgatatgctccaacggggcaaaaacagcagcgatcgttatccgcaaggtgcctacgcaaagcctagtagcgctcttgaaattgtttggttggtcgctcaagtacaaacccagtactagacctggcagatgaggctagaaaacccccactggcgacagtgttctagcctgcgtggctgcctgcacacccatttgggtgtgaagccaaacaacggacagggtgtgaagagccacgtgtgctcatcttgattcctccggcccctgaatgcggctaaccttaaacctgcagccattgctcacaatccagtgagttggtggtcgtaatgagcaattgcgggatgggaccgactactttgggtgtccgtgtttcactttttaccttgttttatgcttatggtgacaatatatagtagtatatattgacacc

SEQ ID NO: 398 - RNA, 621 nt, synthetic construct
  source 1..621: mol_type = other RNA
ttaaaactggatccaggttgctcccacctggatctcctacatggagttgtactctattattccggtaattttgtacgccagttttatctccccctacccccttacgtaacttagaagttttacacacaccgaccaataggtggtatttacccaaaataccaaaggtcaagcacttctgttaccccggtcaaaattgatatgctccaccagggcaaaaacaattgcgatcgttatccgcaaagcaactacgcaaagcctagtaccatttttgatgatgtgtggttggtcgttccactatgaacccgatagtagacctggcagatgaggctagaaattccccactggcaacagtgttctagcctgcgtggctgcctgcgtaccccctgtgggtacgaagccatacatttgacaaggtgtgaagagccccgtgtgcttgctttgagtcctccggcccctgaatgtggctaaccttaaccctgcagctagtgtgtacaatccagtacatagctagtcgtaatgagcaattgcgggatgggaccaactactttgggtgtccgtgtttcttgtttttctttcatatttgcttatggtgacaatatatataacacatatattggcacc

SEQ ID NO: 399 - RNA, 614 nt, synthetic construct
  source 1..614: mol_type = other RNA
ttaaaactgggtccaggttgttcccacctggatctcctattgggagttgtactctattattccggtaattttgtacgccagttttatctccccttccccaattgcaacttagaagtttatcaatatgaccaataggcggtagttagccaaactaccagaggtcaagcacttctgtttccccggtcaaagttgatatgctccaacagggcaaaaacaactgagatcgttatccgcaaagtgcctacgcaaagcctagtaacacctttgaagatttatggttggtcgttccgctatttcccatagtagacctggcagatgaggctagaaattccccactggcgacagtgttctagcctgcgtggctgcctgcgcaccccttgggtgcgaagccatacattggacaaggtgtgaagagccccgtgtgctcactttgagtcctccggcccctgaatgtggctaaccttaaccctgcagctagtgcatgtaatccaacatgttgctagtcgtaatgagcaattgcgggacgggaccaactactttgggtgtccgtgtttcactttttccttttaatattgcttatggtgacaatatatataaacatatatattgacacc

SEQ ID NO: 400 - RNA, 614 nt, synthetic construct
  source 1..614: mol_type = other RNA
ttaaaactggatctgggttgttcccacccagatcacccaagtggtgtagtgctctgttatttcggtaaccttgcacgccagttttatcaccccttccccacgtaacttagaagcttttaaacacagaccaatagggagcgacaaaccagtcgtgaaaggtcaagcacttctgtttccccggtcaatgttgatatgctcctccagggcaaaaacaacagcgatcgttacccgcaagatgcctacgcaaagcttagtaatatcttcgaagatacttggttggtcgctcatgtgcaaccccagcattagacctggcagatgaggctagaaattccccactggcgacagtgttctagcctgcgtggctgcctgcacaccctaacgggtgtgaagcccagtattggacaaggtgtgaagagccccgtgtgctcatcttgagtcctccggcccctgaatgcggctaaccttaaccctgcagccattgctcacaatccagtgagtctatggtcgtaatgagcaattgcgggatgggaccgactactttgggtgtccgtgtttctcttttttccttatatttgagcttatggtgacaatatatagtgatatatattggcatc

SEQ ID NO: 401 - RNA, 534 nt, synthetic construct
  source 1..534: mol_type = other RNA
ccaaagtagttggtcccgtcccgcatgcaacttagaagctttgcacaaagaccaatagccagtaatcatccagattacttaaggtcaagcacttctgtttccccggtcaaagttgatatgctccaccagggcaaaaacaactgcgatcgttatccgcaaggcgcctacacaaagcttagtagcattctgaaagttgtctggttggtcgttccaccattccccctggtagacctggcagatgaggctagaaactccccactggcgacagtgttctagcctgcgtggctgcctgcacaccctctgggtgtgaagccatacgatggacagggtgtgaagagccccgtgtgctcgctttgagtcctccggcccctgaatgtggctaaccttaaccctgcagctagagcacacaatccagtgtgtttctagtcgtaatgagcaattgcgggacgggaccaactactttgggtgtccgtgtttccttgttctctttgaatatctgcttatggtgacaatatatacgtatatattgacacc

SEQ ID NO: 402 - RNA, 621 nt, synthetic construct
  source 1..621: mol_type = other RNA
ttaaaactggatctaggttgttcccacctaaatctcctacatggagttgtactctattattccggtaattttgtacgccagttttatcctcccctccccttaaagtaacttagaagttggacatatcgaccaataggtaacatttatccaaaatgttaaaggtcaagcacttctgtttccccggtcaaggttgatgtgctctaacagggcaaaaacagctgcgatcgttatccgcaaagcaactacgcaaagcctagtagcattttttgagagtatgtggttggtcgctccactataaacccaatagtagacctggcagatgaggctagaaattccccactggtaacagtgttctagcctgcgtggctgcctgcgtgctccttgtgagcacgaagccatatatttgacaaggtgtgaagagccccgtgtgcttgctttgagtcctccggcccctgaatgtggctaaccttaaccctgcagctagcgtgtacaatccagtacaaagctagtcgtaatgagcaattgcgggatgggaccaactactttgggtgtccgtgtttcctgtttttcttttatatttgcttatggtgacaatatatatataacatatatattggcatc

SEQ ID NO: 403 - RNA, 612 nt, synthetic construct
  source 1..612: mol_type = other RNA
ttaaaactggatccaggttgttcccacctggatctcctacatggagttgtactctattattccggtaatcttgtacgccagttttataccccctaaccccttgtaacttagaagttaagcacatagaccaataggcggtggccacccaggtcgctaacggtcaagcacttctgttttcccggttaagattgatacgctccaacagggcgaaaacagtctgaatcgttaaccgcaaagtgactacgcaaagcttagtaatgccttgaagaatttatgactggtcgttccgctataacccctagtagacctggcagatgaggctagaaataccccactggtaacagtgttctagcctgcgtggctgcctgcacaccctttcgggtgtgaagccatatatttgacaaggtgtgaagagccccgtgtgctcactttgagtcctccggcccctgaatgtggctaaccttaaccctgcagctagtgtatgtaatccaacatatggctagtcgtaatgagcaattgcgggatgggaccaactactttgggtgtccgtgtttcactttttccttttattttgcttatggtgacaatatatatattatatatattggcatc

SEQ ID NO: 404 - RNA, 621 nt, synthetic construct
  source 1..621: mol_type = other RNA
ttaaaactgggtctaggttgttcccgcctagattacccatgtggtgtagtactctattattacggtaattttgtacgccagttttatatccccccccccctgtttgtaacttagaagttttgaacttggagaccaataggcggtgattatccagatcatcaacggtcaagcacttctgtttcccccggttagattgatacgctccaacagggcgaaaacaactctaatcgttatccgcaagatgcctacgcaaagcttagtaccaccttcgattctatttggttggtcgttcagctacaaaacccagtagtagacctggcagatgaggctagaaataccccactggcgacagtgttctagcctgcgtggctgcctgcacaccctatgggtgtgaagccaattagttgacaaggtgtgaagagccccgtgtgctcatcttgattcctccggcccctgaatgtggctaaccttaaacctgcagccaatgtacacaatccagtgtattattggtcgtaatgagtaattgcgggatgggaccaactactttgggtgtccgtgtttctcttttttacctttattattgcttatggtgacagtatatggtatatatatattgtcact

SEQ ID NO: 405 - RNA, 612 nt, synthetic construct
  source 1..612: mol_type = other RNA
ttaaaactggatctgggttgttcccacctggatctcctacatggagttgtactctattattccggtaatcttgtacgccagttttatacccctttcccttttgtaacttagaagttaaacacacagaccaataggtgatggctatccaagtcattaacggtcaagcacttctgtttccccggtttaaattgatacgctccaccagggcgaaaacaatttaaatcgttatccgcaaaatgactacgcaaagcctagtaacatcttgaagaacttatggttggtcgttccactaaaccccatagtagacctggcagatgaggctagaaataccccactggagacagtgttctagcctgcgtggctgcctgcacaccctatgggtgtgaagccatatttttgacaaggtgtgaagagccccgtgtgctcattttgagtcctccggcccctgaatgtggctaaccttaaccctgcagctagtgcatgcaatccagcatgttgctagtcgtaatgagcaattgcgggatgggaccaactactttgggtgtccgtgtttcactttttccttttatttgcttatggtgacaatatatatagtacatatatattggcatc

SEQ ID NO: 406 - RNA, 608 nt, synthetic construct
  source 1..608: mol_type = other RNA
ttaaaactggatccaggttgtccccacctggatctcccacagggagtggtactctgttattacggtaactttgtatgccagttttatcctccccacccctatgtaacttagaagttttacataaagaccaataggtagtaatcatccagattacttaaggtcaagcacttctgtttccccggttgatgttgatatgctccaacagggcaaaaacaacagaaatcgttacccgcaaagtgcctacgcaaagcctagtagcactttagaagttgtctggctggtcgctccgccatttcccctggtagacctggcagatgaggctagaaataccccactggcgacagtgttctagcctgcgtggctgcctgcacaccctatgggtgtgaagccatacaatggacaaggtgtgaagagccccgtgtgctcactttgagtcctccggcccctgaatgtggctaaccttaaccctgcagctagggcacacaatccagtgtgtatctagtcgtaatgagcaattgcgggacgggaccaactactttgggtgtccgtgtttctcttttatccttatgtttgcttatggtgacaatatatgaatatatattgacacc

SEQ ID NO: 407 - RNA, 611 nt, synthetic construct
  source 1..611: mol_type = other RNA
ttaaaactgggtgcgagttgttcccactcgcacttcctacgtggagtagtacactattattacggtaattttgtacgccagttttataacccttccccttttgtaacttagaagtttgaacttgagaccaataggtggtgatcaaccagatcgccaaaggtcaagcacttctgtttccccggtcaacattgatatgctccaccagggcaaaaacaattgcgatcgttacccgcaaagtgcctacgcaaagcttagtaatatcttgaacgatatatggttggtcgctccactaatccccatagtagacctggcagatgaggctggaaactccccactggcgacagtgttccagcctgcgtggctgcctgcgcactctcacgagtgcgaagccatatatttgacaaggtgtgaagagccccgtgtgctcactttgagtcctccggcccctgaatgtggctaaccttaaccctgcagctagtgcatacaaaccagtatgtggctagtcgtaatgagcaattgcgggacgggaccaactactttgggtgtccgtgtttcactttttcttttatggtttgcttatggtgacagtatatagtgtatatattgttacc

SEQ ID NO: 408 - RNA, 610 nt, synthetic construct
  source 1..610: mol_type = other RNA
ttaaaactggatccgggttgttcccacccggatctcccacgtggagttgtacactattattacggtaattttgtacgccagttttatatcccttaccccaagtaacttagaagataaacacacagaccaataggaggtggtcatccagatcactaagggtcaagcacttctgtttccccggtcaaggttgatatgctccaacagggcaaaaacagctgagatcattatccgcaaagtgcctacgcaaagcctagtaactacctcgaaagtacttgactggtcgctccgccataccccatggtagacctggcagatgaggctagaaatcccccactggtgacagtgttctagcctgcgtggctgcctgcacaccctttgggtgtgaagccaagtaatggacagggtgtgaagagtcgagtgtgctcactttgagtcctccggcccctgaatgtggctaaccctaaccctgcagctagggcacacaatccagtgtgtatctagtcgtaatgagcaattgcgggatgggaccaactactttgggtgtccgtgtttcttgtttttcatttataattgcttatggtgacaatatatagtattatatattggcgtc

SEQ ID NO: 409 - RNA, 619 nt, synthetic construct
  source 1..619: mol_type = other RNA
ttaaaactggatctaggttgttcccacctagatctcctacacggagttgtactctgttattccggtaactttgtacgccagttttatacccccttccccctttgtaacttagaagctgaacatactgaccaataggcggcattcaaccagaatgtcaaaggtcaagcacttctgtttccccggttaaagctgatatgctccaacagggcaaaaacagccttaatcgttatccgcaagacaactacgcaaagcctagtatcatctttgaaagtatgtggttggtcgctccgctataaactcaatagcagacctggcagatgaggctagaaactccccactggcgacagtgttctagcctgcgcggctgcctgcgtgccctatacgggtacgaagccatatatttgacaaggtgtgaagagccccgtgtgcttgtcttgagtcctccggcccctgaatgtggctaaccttaaccctgcagctggtatgcacaatccagtacatggccagtcgtaatgagcaattgcgggatgggaccaactactttgggtgtccgtgtttcctattttacctttatatttgcttatggtgacaatatatatataacatatatattggcatc

SEQ ID NO: 410 - RNA, 611 nt, synthetic construct
  source 1..611: mol_type = other RNA
ttaaaactgggtccaggttgttcccacctggacttcccacgtggagttgtgcactgttattccggtaactttacacgccagttttatctcccttcccaaatgtaacttagaagatgtacacagcgaccaataggtggcaactagccaagttgcttaaggtcaagcacttctgtccccccggtcaatgttgatacgctctcccagggcgaaaacaactgagatcgttatccgcaaggcgcctacacaaaacctagtaacatcttgaatggtatgtggctggtcgttccgctaaaccccatagtagacctggcagatgaggctagaaattccccactggcgacagtgttctagcctgcgtggctgcctgcgtgtccttacggacacgaagccatatacttgacaaggtgtgaagagtcccgtgtgctcgtcttgagtcctccggcccctgaatgtggctaaccttaaccctgcagccagtgcgcacaaaccagtgtgtagctggtcgtaatgagtaattgcgggatgggaccaactactttgggtgtccgtgtttcactttttaccttttattatgcttatggtgacaatatatagatgcatatattgacacc

SEQ ID NO: 411 - RNA, 616 nt, synthetic construct
  source 1..616: mol_type = other RNA
ttaaaactgggagtgggttgttcccactcactccacccatgcggtgttgtacactgttattacggtaaccttgtacgccagttttgccacccttccccattatgtaacttagaagtttgtacaacaagaccaataggtgataattatccagattatcaaaggtcaagcacttctgtttccccggtcgatgaggatatgctttacccaaggcaaaaaccttaaagatcgttatccccacactgcctacacagagcctagtaccacttttgatgtaattaggttggtcgctccctgcaaacccagcagtagacctggcagatgaggctggacactccccactggtgacagtggtccagcctgcgtggctgcctgctcaccctattgggtgagaagcctacttattgacaagatgtgaagagccgcgtgtgctcagtgtgcttcctccggcccctgaatgtggctaaccttaaccctgcagccgctgcccataatccaatgggtttacggtcgcaacgcgcaagtgcgggatgggaccaactactttgggtgtccgtgtttcctatttttcttttatttgcattttatggtgacaatttatagtatatagattgtcgtc

SEQ ID NO: 412 - RNA, 610 nt, synthetic construct
  source 1..610: mol_type = other RNA
ttaaaactggatctgggttgttcccactcagatctcccatgcggagttgtactctattattccggtaatcttgtacgccagtttttacaccctccccccttgtaacttagaagaaagtacataacgaccaataggtggcaattaaccaaattgtcaacggtcaagcacttctgtttccccggtcaagattgatacgctccaacagggcgaaaacaattgagatcgttatccgcaaagtgcccacgcaaagcctagtaacactttgaaaggtctatggttggtcgttcagctaaaccccatagtagacctggcagatgaggctagaaattccccactggcgacagtgttctagcctgcgtggctgcctgcacaccctcacgggtgtgaagccatatactcgacaaggtgtgaagagccccgtgtgctcactttgagtcctccggcccctgaatgtggctaaccttaaccccgcagctagtgcatacaaaccagtatgtggctagtcgtaatgagcaattgtgggatgggaccaactactttgggtgtccgtgtttcacttttttccttttgtttgcttatggtgacaatatatatagtatatattgacacc

SEQ ID NO: 413 - RNA, 614 nt, synthetic construct
  source 1..614: mol_type = other RNA
ttaaaactggatctgggttgttcccacctagatcacctacagggtgtagtacactgttattacggtaactttgtacgccagttttatatccccccccccaacgtaacttagaagcaagcacaaacgtccaataggcggtgatcatccaaatcacttacggacaagcacttctagtctccccggcaactgctgatatgctccaacagggcaaaaacagcgggagtcgttatccgcaaaatgcctacgcaaagcctagtatcaccctagaaggtgtgtggttggtcgctcagccgtgaacccgacggtagacctggcagatgaggctagaaataccccactggcgacagtgttctagcctgcgtggctgcctgcacaccctcacgggtgtgaagccattcattggacagggtgagaagagcccagtgtgctcattttgagtcctccggcccctgaatgtggctaaccttaaacctgcagccaatgcacacaatccagtgtgtatttggtcgtaacgagcaattgcgggatgggaccaactactttgggtgtccgtgtttctttttattcttatcattttgcctatggtgacatatatactgttatatattgttatc

SEQ ID NO: 414 - RNA, 612 nt, synthetic construct
  source 1..612: mol_type = other RNA
ttaaaactggatccaggttgttcccacctggatttcctacatggagttgtactctgttattccggtaaccttgtacgccagttttatatccccccccattgtaacttagaagttatgcatacagaccaataggtggtgatcctccagatcactaacggtcaagcacttctgtttccccggtttgaattgatacgctccaacagggcgaaaacagtttaaatcgttatccgcaaagtgcctacgcaaagcctagtagcactttagaaaatctatggttggtcgttcagctataccccctagtggacctggcagatgaggctagaagtaccccactggcgacagtgttctagcctgcgtggctgcctgcacacccttatgggtgtgaagccatatatttgacaaggtgtgaagagccccgtgtgctcactttgagtcctccggcccctgaatgtggctaaccttaaccctgcagctagtgcatgtaatccaacatgttgctagtcgtaatgagcaattgcgggatgggaccaactactttgggtgtccgtgtttcactttttccttttaatttgcttatggtgacaatatatatataacatatatattggcatc

SEQ ID NO: 415 - RNA, 615 nt, synthetic construct
  source 1..615: mol_type = other RNA
ttaaaactgggtttgggttgatcccacccaaaccacccacgtggtgtagtacactgttatctcggtaactttgtacgccagttttatctccccctcccccctttgtaacttagaagtcatgcacaatgaccaatagcaggcaatcatccagattgtcatcggtcaagtacttctgtttccccggttcagattgatatgctccaacagggcaaaaacaacctggatcgttatccgcaagatgcctacgcagaacctagtatcacactggaagattctcggttggtcgctcagttacaaccccagtaacagacctggcagatgaggctagaaattccccactggcgacagtgttctagcctgcgtggctgcctgcacacccgtttgggtgtgaagcctagaattggacagggtgcgaagagtcgagtgtgctcatcttgagtcctccggcccctgaatgcggctaaccctaaccctgcagccattgcccacaaaccagtgggtctatggttgtaatgagcaattgcgggatgggaccgactactttgggtgtccgtgtttcactttttacttattatttgcttatggtgacaatatatagatacatatattgacacc

SEQ ID NO: 416 - RNA, 613 nt, synthetic construct
  source 1..613: mol_type = other RNA
ttaaaactgggtccaggttgctcccacctggatcactcactgagtgttgtatactgttattacggtaactttatacgccagttttatctccccttaccccaatgtaacttagaagtttgtacataccgaccaatagtgagcaatcatccagattgtttaaggtcaagcacttctgttaccccggtcagcgttgatatgctccaacagggcaaaaacaacaatgatcgttatccacaagatgcctacacagagcctagtaacattctagaaaaattctggttggtcgctcaattgcaaacccagcaatagacctggcagatgaggctggacattccccactggcgacagtggtccagcctgcgtggctgcctgcacactcctttggagtgtgaagccataatttggacagggtgcgaagagccgcgtgtgctcatcttgagtcctccggcccctgaatgcggctaaccttaaacctgcagccattgtttgcaatccagcagatatatggtcgtaatgagcaattgcgggatgggaccgactactttgggtgtccgtgtttcctttatttccatttatatgcttatggtgacaatatatgatatatattgacacc

SEQ ID NO: 417 - RNA, 615 nt, synthetic construct
  source 1..615: mol_type = other RNA
ttaaaactgggtcgtggttgttcccaccacgactatctacggatgtagtgctcttgtattccggtacgcttgcacgccagttttgtcacccccccctacattgtaacttagaagattaacacaaagaccaataggcggcaatgaaccacattgtcaacggtcaagcacttctgtttccccggtcaatctagatatgctttaccaaaggcaaaaactggagcgatcgttatccgcaaggtgcctacgggaaacccagtagcattctttatttgatctggttggttgctcagccgttaaacccaaacggtaaacctggcagatgaggctggaagatccccaccagcgatggtgttccagcctgcgtggctgcctgcacacccgaaagggtgtgaagccttttcaaagacagggtgcgaagagtctactgtgctcaccttgattcctccggcccctgaatgtggctaatcctaaccccgtagctgtggtgtgcaatccagcacattcgcagtcgtaatgggtaactgcgggatggaaccaactactttgggtgtccgtgtttctctttttccttttatatatgcttatggtgacaattatacggatatagttgtcatc

SEQ ID NO: 418 - RNA, 612 nt, synthetic construct
  source 1..612: mol_type = other RNA
ttaaaactggatctgggttgttcccacccagatttcccatgtggagtagtactctattattccggtaattttgtacgccagttttatattccctaccccgagtaacttagaagataagcacacaaggccaatagtgggtgattagccaaatcatcaaaggtcaagcacttctgtttcccccggtcaaggttgatatgctctaccagggcaaaaacaactgagatcgttatccgcaaaatgcctacacaaagcctagtatcatcttggaaggcacagagttggtcgctccactattccccatagtagacctggcagatgaggctagaaaatccccactggcgacagtgttctagcctgcgtggctgcctgcgtgccttgcgaggcacgaagccctgtgtttgacaaggtgtgaagagccccgtgtgctcattttgattcctccggcccctgaatgtggctaaccttaaccctgcagctagtgcacacaaaccagtgtgtatctagtcgtaatgagtaattgcgggacgggaccaactactttgggtgtccgtgtttcactttttaccttttaattgcttatggtgacaatatatataaatatatattgacacc

SEQ ID NO: 419 - RNA, 612 nt, synthetic construct
  source 1..612: mol_type = other RNA
ttaaaactgggtgtgggttgttcccacccacacctcccacgtggagtagtacactgttatcacggtaattttgtacgccagttttataacccctttcccttttgtaacttagaagtttgaacttgagaccaataggcggtggtcaaccagatcactaaaggtcaagcacttctgtttccccggtcaacgttgatatgctccagcagggcaaaaacagctgcgatcgttatccgcaaagtgcctacgcaaagcttagtaacatcttgaatgatatatggttggtcgttccactaaaccccatagtagacctggcagatgaggctggaaattccccactggcgacagtgttccagcctgcgtggctgcctgcgcactcttatgagtgcgaagccatatatttgacaaggtgtgaagagccccgtgtgctcactttgagtcctccggcccctgaatgtggctaaccttaaccctgcagctagtgcatacaatccagtgtgtagctagtcgtaatgagcaattgcgggatgggaccaactactttgggtgtccgtgtttcacttttccttttatgatttgcttatggtgacagtatatagtttatatattgttgcc

SEQ ID NO: 420 - RNA, 612 nt, synthetic construct
  source 1..612: mol_type = other RNA
ttaaaactggatccaggttgttcccacctggatctcccaaagggagtggaactctgttattacggtaactttgtacgccagttttatcctcccccaccccatgtaacttagaagcttttcacaaagaccaatagttggtaatcatccagattacttaaggtcaagcacttctgtttccccggtcaacgttgatatgctctaacagggcaaaaacaactgcgatcgttatccgcaaagcgcctacgcaaagcctagtaacacctttgaaattgtttggttggtcgttccgccattttccctggtagacctggcagatgaggctagaaacaccccactggcgacagtgttctagcctgcgtggctgcctgcacaccctgtgggtgtgaagccaaataatggacaaggtgtgaagagccccgtgtgctcgctttgagtcctccggcccctgaatgcggctaaccttaaccctgcagctagagcacacaagccagtgtgtatctagtcgtaatgagtaattgcgggacgggaccgactactttgggtgtccgtgtttcactttttacttataattgcttatggtgacaatatatatatagtatatatattgacacc

SEQ ID NO: 421 - RNA, 610 nt, synthetic construct
  source 1..610: mol_type = other RNA
ttaaaactgggtccaggttgttcccacctggatctcctaatgggagttgtactctgttattccggtaactttgtatgccagttttatctccctacccccaatgtaacttagaagatgtacacaacgaccaataggtgatgatcaaccagattatcaaaggtcaagcacttctgttttcccggttagagttgatatgctccaacagggcaaaaacaactttaatcgttatccgcaaagcgcctacgcaaagcctagtaacagcttcgaagatttatggttggtcgttccgctgttccccacagtagacctggcagatgaggctagagattccccactggtaacagtgttctagcctgcgtggctgcctgcgcacccttcgggtgcgaagccatatttcggacaaggtgcgaagagccccgtgtgctcgctttgagtcctccggcccctgaatgtggctaaccttaaccctgcagctagtgcatacaaaccagtatgtggctagtcgtaatgagcaattgcgggatgggaccaactactttgggtgtccgtgtttctctttttccttttattattgcttatggtgacaatatatagtttatatattggcacc

SEQ ID NO: 422 - RNA, 613 nt, synthetic construct
  source 1..613: mol_type = other RNA
ttaaaactgggtgtgggttgtacccacccacactgtctacggacgtagtgctctcatattacggtatgtttgcacgccagtttttaccccccccccaaatttgtaacattagaagtctgcactcttaacctggtcaataggaggtagcaatccatgctatctaagaccaagcacttctgttaccccggtatgcggagaatagactccaaaagggttgaagctccaaatatcgttatccgcacaattactacacaaagcctagtaatatcttgataagctctttggttggtcgttcagctgttacccccagtagacttggcagatgaggctgggtgttccccactggcgacagtgacccagcctgcgtggctgcctacacacctggagacaggtgtgaagccaaaagtggacaaggtgtgaagagccccgtgtgctaattgtgattcctccggcccctgaatgcggctaatccaaccccacagccaatgcatgtaaaccaacatgtatttggtcgtaacgggtaactgtgggacggaaccgactactttgggtgtccgtgtttccttttatttttattgcttatggtgacaagtattggtatatatttgtcatc

SEQ ID NO: 423 - RNA, 612 nt, synthetic construct
  source 1..612: mol_type = other RNA
ttaaaactggatctgggttgctcccacccagattacccaagtggtgtagtactctgttattacggtagctttgtacgccagttttatcacccctccccacaatgtaacttagaagttttacacttacagaccaataggatgtgattatccaaatcactaaaggtcaagcacttctgtttccccggttagatttgatacgctccaacagggcgaaaacagatctgatcgttatccgcaagatgcctacgcaaagcttagtagcgctctgaatgctttttggctggttgttccactacaaacccagtagtaaacctggcagatgaggctagaagttccccactggcgacagtgttctagcctgcgtggctgcctgcacaccctatgggtgtgaagccaatcagttgacagggtgtgaagagccccgtgtgctcatcttgagtcctccggcccctgaatgtggctaaccttaaacccgcagccaaggtgtgcaaaccagcacattcttggtcgtaacgagtaattgtgggatgggaccaactactttgggtgtccgtgtttctttttattcttttacaatgcctatggtgacaatatatagtatatattgtcatt

SEQ ID NO: 424 - RNA, 611 nt, synthetic construct
  source 1..611: mol_type = other RNA
ttaaaactgggtctaggttgttcccacctagacctcctacatggagttgtactctattatttcggtaattttgtacgccagttttatatcccctttccccacgtaacttagaagtttaacacactgaccaataggtggcaattaaccaaattgctaaaggtcaagcacttctgtttccccggtcaagattgatacgctctaccagggcgaaaacaattgagatcgttacccgcaaagtgcctacgcgaagcctagtaacatcttgaagaatttatggttggtcgctccactattccccatagtagacctggcagatgaggctagaaattccccactggcgacagtgttctagcctgcgtggctgcctgcacacccttacgggtgtgaagccatatatttgacaaggtgtgaagagcctagtgtgctcactttgagtcctccggcccctgaatgtggctaaccttaaacccgtagctagtgcatacaatccagtgtgtggctagtcgtaacgagcaattacgggatgggaccaactactttgggtgtccgtgtttcactttttccttttatatttgcttatggtgacaatatatagattatatattgacacc

SEQ ID NO: 425 - RNA, 522 nt, synthetic construct
  source 1..522: mol_type = other RNA
accttcctccatgtaacttagaagatgtacactcagaccaataggtgataatcctccagattatctaaggtcaagcacttctgtttccccggtctaaactgatatgctccaacagggcaaaaacagtgcagatcgttatccgcaggatgcctacgcaaagtctagtaacccctttgaagatatttggttggtcgctccactattccccatagtagacctggcagatgaggctagaaattccccactggtgacagtgttctagcctgcgtggctgcctgcacaccctattgggtgtgaagccaaatattggacaaggtgtgaagagccccgtgtgctcatcctgagtcctccggcccctgaatgtggctaaccttaaccctgcagctagtgcatgcaatccagcatgtagctagtcgtaatgagcaattgcgggatgggaccaactactttgggtgtccgtgtttcactttttaccttatatttgcttatggtgacaatatatattgcatatatattggcatc

SEQ ID NO: 426 - RNA, 613 nt, synthetic construct
  source 1..613: mol_type = other RNA
ttaaaactgggttcaggttgttcccacctggacttcctatgtggagttgtacactgttatcccggtaaccttgtacgccagttttatacacccttccctgtaacttagaagttataagcacgaggaccaataggtagtgactttccaggtcactaaaggtcaagcacttctgtctccccggtcaaagttgatatgctctccccagggcaaaaacaattgagatcgttatccgcaatgtgcctacgcaaagcctagtaatatcttagatgatatatggttggtcgctccgccatttcccatggtagacctggcagatgaggctagaaactccccactggcgacagtgttctagcctgcgtggctgcctgcgcactctctgagtgcgaagccatatatttgacaaggtgtgaagagccccgtgtgctcacattgaatcctccggcccctgaatgtggctaaccttaaacctgcagctagtgcacacaaaccagtgtgtagctagtcgtaacgagcaattgcgggatgggaccaactactttgggtgtccgtgtttcacttttttccttttatatttgcttatggtgacaatatatataatacatatattgacacc

SEQ ID NO: 427 - RNA, 614 nt, synthetic construct
  source 1..614: mol_type = other RNA
ttaaaactggatccaggttgttcccacctggatctcctacgggagttgtactctgttatttcggtaaccttgtacgccagttttatctcccctcccccaattgtaacttagaagcaatacacaaggaccaataggcagtgattaaccagatcacttaaggtcaagcacttctgtttccccggtctgagttgatatgctctaacagggcaaaaacaagtcagatcgttatccgcaaagtgcctacgcaaagcctagtatcatctttgaaaatgtatggttggtcattccgctgaaccccacagtagacctggcagatgaggctagaaaccccccactggcgacagtgttctagcctgcgtggctgcctgcacacccttatgggtgtgaagccatatatttgacaaggtgtgaagagccccgtgtgctcactttgagtcctccggcccctgaatgtggctaaccctaaccctgcagctagtgcatacaagccagtatgttgctagtcgtaacgagcaattgcgggatgggaccaactactttgggtgtccgtgtttcactttttacctttatactgcttatggtgacaatatatatatagcatatatattgacacc

SEQ ID NO: 428 - RNA, 618 nt, synthetic construct
  source 1..618: mol_type = other RNA
ttaaaactgggagtaggttgttcccacctactctacccacgtggtgttgtacactgttatcacggtaactttgtatgccagttttgccacccttccccgtagcgtaacttagaagtttgtacacttagaccaataggcgataatcatccagattatcaaaggtcaagcacttctgtttccccggtcaatgaggatatgcttttcccaaggcaaaaaccttagagatcgttatccccacattgcctacacagagcctagtatcacctttgatgtatttagactggtcgctccctgcaaacccagcagtagacctggcagatgaggctggacgttccccactggcgacagtggtccagcctgcgtggctgcctgcccacccatttgggtgggaagcctaactattgacatggtgtgaagagccgcgtgtgctcaatgtgcctcctccggcccctgaatgtggctaaccttaaccccgcagccgctgcccatgatccagtgggtatacggtcgtaacgcgcaagtgtgggatgggaccaactactttgggtgtccgtgtttcctgtttttcttttttttatgcattttatggtgacaatttatggtatatagattgtcatc

SEQ ID NO: 429 - RNA, 611 nt, synthetic construct
  source 1..611: mol_type = other RNA
ttaatactggatccaggttgttcccacctggatctcccaagcggagtggtacactattatcccggtaattttgtacgccagttttataacccctcccctttgtaacttagaagatgtaaacacagaccaataggtggtaactaaccaagttactaaaggtcaagcacttctgtttccccggctgatattgatatgctccaccagggcaaaaacaatagaagtcgttatccgcaaagtgcctacgcaaagcctagtaacactttgaattgtttatggttggtcgctcagctattccccctagtagacctggcagatgaggctagaaataccccactggtaacagtgttctagcctgcgtggctgcctgcgcacccctccgggtgcgaagccatacacatgacaaggtgcgaagagccccgtgtgctcactttgaatcctccggctcctgaatgtggctaaccttaaacctgcagccagtgcacataagccaatgtgtatctggtcgtaatgagtaattgcgggatgggaccaactactttggatgtccgtgtttcttgtttttccttaattttgcttatggtgacaatatatagataatatatattggcatc

SEQ ID NO: 430 - RNA, 613 nt, synthetic construct
  source 1..613: mol_type = other RNA
ttaaaactggatccaggttgttcccacctggatctcctaacgggagtagtacactattattacggtaattttgtacgccagttttatgatcccctcccccttttgtaacttagaagttaaacaaaatgaccaataggcggcaatctcccagattgtcaaaggtcaagcacttctgtttccccggtcaaagctgatatgctccaacagggcaaaaacagctgagatcgttacccgcaaagtgcctacgcaaagcttagtaacacttttgaagttacgtggttggtcgctcagccaaaccccatggtagacctggcagatgaggctagaagtaccccactggcgacagtgttctagcctgcgtggctgcctgcacaccctctgggtgtgaagccatataatggacaaggtgtgaagagccccgtgtgctcactttgagtcctccggcccctgaatgtggctaaccttaaccctgcagctagtgcatgcaatccagtatgtatctagtcgtaatgagcaattgcgggatgggaccaactactttgggtgtccgtgtttcctttttatccttattgattgcttatggtgacaatatatagtattatatattgacacc

SEQ ID NO: 431 - RNA, 618 nt, synthetic construct
  source 1..618: mol_type = other RNA
ttaaaactgggtctgggttgctcccacccagaccacccatgtggtgttgtacactgttattccggtaactttgtacgccagttttgaactcccctaccccttttgtaacttagaagctaaacacatcgaccaatagcaggcaatcacccagattgcttatggtcaagtacttctgtttccccggtctcctctgatatgctctaccagggcaaaaacagagtagatcgttatccgcaagatgcctacgcaacgcctagtaacactttgaagtgtttttggttggtcgctcagttacaaccccagtaatagacctggcagatgaggctagatatcccccactggcgacagtgatctagcctgcgtggctgcctgcacaccctttatgggtgtgaagccaaacatatgacaaggtgcgaagagccacgtgtgctcatcttgagtcctccggcccctgaatgcggctaacctcaaccctgcagccattgctcacaagccagtgggtatgtggtcgtaatgagaaattgcgggacgggaccgactactttgggtgtccgtgtttcacttttttaccttattttgcttatggtgacaatatatatacagatatatattgacacc

SEQ ID NO: 432 - RNA, 614 nt, synthetic construct
  source 1..614: mol_type = other RNA
ttaaaactggatccaggttgttcccacctggatctcctacgtggagttgtactctattattccggtaatcttgtacgccagttttatattccctaccccttttgtaacttagaagttaagcacacagaccaataggcggtgaccacccaagtcactaacggtcaagcacttctgtttccccggttaagattgatacgctccaacagggcgaaaacaatttaaatcgttaaccgcaaagtgactacgcaaagcttagtaataccttgaagaatttatggctggtcgttccgctataacccctagtagacctggcagatgaggctagaaataccccactggtaacagtgttctagcctgcgtggctgcctgcacaccctttttgggtgtgaagccatatatttgacaaggtgtgaagagccccgtgtgctcactttgagtcctccggcccctgaatgtggctaaccttaaccctgcagctagtgtatgtaatccaacatatggctagtcgtaatgagcaattgcgggatgggaccaactactttgggtgtccgtgtttcactttttccttttattttgcttatggtgacaatatatataatatatatattggcatc

SEQ ID NO: 433 - RNA, 618 nt, synthetic construct
  source 1..618: mol_type = other RNA
ttaaaactgggtccaggttgttcccacctggacctcctaagtggagtggtacactattattccggtaattttgtacgccagttttatctccccaccccccttttgtaatttagaagttatgaacacagaccaataggtggcaactagccaagttgttaaaggtcaagcacttctgtctccccggctgacgttgatatgctccaacagggcaaaaacaatgaaagtcgttatccgcaaagtgcctacgcaaagcctagtaacactttgaaatgtctatggttggtcgctcagctattccccatagtagacctggcagatgaggctagaaataccccactggtaacagtgttctagcctgcgtggctgcctgcgcaccctccccgggtgcgaagccatatatatgacaaggtgcgaagagccccgtgtgctcactttgaatcctccggctcctgaatgtggctaaccttaaccccgcagccagtgcacataagccaatgtgtggctggtcgtaatgagcaattgtgggatgggaccaactactttggatgtccgtgtttcctgtttttcttttattcttgcttatggtgacaatatatatagtttatatatattggcatc

SEQ ID NO: 434 - RNA, 614 nt, synthetic construct
  source 1..614: mol_type = other RNA
ttcaaactggatctgggttgttcccacccagatcacccaagtggtgtagtactctgtcattccggtgactttgtacgccagtttttacaccccccccttcttgtaacttagaagaattaagttcagaccaataggaaaacgacaaaccagtcgtttaaggtcaagcacttctgtttccccggtcaatgctgatatgcttcaccaaggcaaaaacagcagcgatcgttacccgcaagacgcctacgcaaagcctagtaatgcctttgaagatatttgtctggtcactcaggtacaatcccagtactagacctggcagatgaggctggaaaatccccactggcgacagtgttccagcctgcgtggctgcctgcacacccatacgggtgtgaagccaaatattggacaaggtgtgaagagccccgtgtgctcgtcttgagtcctccggcccctgaatgcggctaaccttaaccccacagccattgcttgcattccagcaagtctatggtcgtaatgagcaattgtgggatgggaccgactactttgggtgtccgtgtttcactttttaccttttattatgcttatggtgacaatatatagcgttatatattggcatc

SEQ ID NO: 435 - RNA, 623 nt, synthetic construct
  source 1..623: mol_type = other RNA
ttaaaactgggtgtgggttgcacccacccacactgtctacggacgtagtgctctcatattacggtatgcttgcacgccagtttgtttcccctttccccttttgtaactatagaagattgcacttaatctcgaccaataggcagtagtgatccacactacttacggtcaagcacttctgttaccccggtatgcggagaataggctctgaaaagggctgaagcttcaattatcgtcatccgcgcaattactacgcaaagcttagtaacttcccaagaaattctttggttggccgttccgctggtaccccaccagtaggcttggcagatgaggctgagtaatccccactggcgacagtgactcagcctgcgtggctgcctacacacctggtaacaggtgtgaagccatagaaaggacagggtgtgaagagccccgtgtgctaattgtgattcctccggcccctgaatgcggctaatctaaccccacatccaatgcgcataagccaatgcgtatttggtcgtaatgggcaactgtgggacggaaccgactactttgggtgtccgtgtttctttttattccttataattagttcatggtgacaagtataagtgtttatatttgtcatc

SEQ ID NO: 436 - RNA, 616 nt, synthetic construct
  source 1..616: mol_type = other RNA
ttaaaactggatctaggttgttcccacctagatctcccatgtggagtagtactctattattacggtaattttgtacgccagttttatatccccttccccttttgtaacttagaagtcgtgaacacagaccaataggtggcgatcacccagatcgcttaaggtcaagcacttctgtttccccggtcaacgttgatatgctccaccagggcaaaaacaacggagatcgttatccgcaaggtgcctacgcaaagcctagtaacctcttggaggatatatggttggtcgctcagctataccccatagtagacctggcagatgaggctagaaactccccactggcgacagtgttctagcctgcgtggctgcctgcgcactcttatgagtgcgaagccatatatttgacaaggtgtgaagagccccgtgtgctcaccttgagtcctccggcccctgaatgtggctaaccctaaccctgcagctagtgcatgaaatccatcatgttgctagtcgtaatgagcaattgcgggatgggaccaactactttgggtgtccgtgtttcactttttccttttatatttgcttatggtgacaatatatatataacatatatattggcatc

SEQ ID NO: 437 - RNA, 611 nt, synthetic construct
  source 1..611: mol_type = other RNA
ttaaaactggatctaggttgttcccacctagatctcccaagtggagtggtacactattatcacggtaattttgtacgccggttttatctccccttaccccaagtaacttagaagtattacataaagaccaacaggcagtgattatccagatcactaaaggtcaagcacttctgtctccccggtcaaagttgatatgctccaacagggcaaaaacaactgagatcgttatccgcaaagtgcctacgcagagcctagtaactaccttgaaattacttggttggtcgttccaccaaaccccatggtagacctggcagatgaggctagaaattccccactggtaacagtgttctagcctgcgtggctgcctgcacaccctttgggtgtgaagccaagtaatggacagggtgtgaagagccgagtgtgctcactttgagtcctccggcccctgaatgtggctaaccttaaccctgcagctagagcgcgcaaaccagcgtgtatctagtcgtaatgagcaattgcgggacgggaccaactactttgggtgtccgtgtttctttttattcttatatttgcttatggtgacaatatataattatttgtatattggcacc

SEQ ID NO: 438 - RNA, 622 nt, synthetic construct
  source 1..622: mol_type = other RNA
ttaaaactgggtccaggttgttcccacctggatctcctacgtggagttgtactctattattccggtaattttgtacgccagttttatctcccctacccctctatgtaacttagaagtttatgcacagcggccaataggtgacatttatccaaaatgtcaaaggtcaagcacttctgttaccccggttagaattgatatgctccaacagggcaaaaacaattttgatcgttatccgcaaggcaactacgcaaagcctagtaccatttttgatgatgtgtggttggtcgctccactgtgaacccgacagtagacctggcagatgaggctagaaattccccactggtaacagtgttctagcctgcgtggctgcctgcgtacccttttgcgggtacgaagccatacatttgacaaggtgtgaagagccccgtgtgcttgccttgagtcctccggcccctgaatgtggctaaccttaaccctgcagctagtgtgcacaatccagtgcatggctagtcgtaacgagcaattgcgggatgggaccaactactttgggtgtccgtgtttcttgtttttcttttatatttgcttatggtgacaatatatacataatatatatattggcacc

SEQ ID NO: 439 - RNA, 625 nt, synthetic construct
  source 1..625: mol_type = other RNA
ttaaaactgagtgtgggttgttcccacccacactgtctacggacgtagtgctctcatattccggtatgtttgcacgccagtttgcctctccttttcccacgtaacgttagaagcttatgcactaaatcgaccactaggtgagtgataaaccatatcattctttggtcaagcacttctgtttccccggtatgcagggaataggccctccccagggctgaagccttaattatcgttatccgcacatttactacgcaaagcctattagcgttctggaagttcactggctggtcgttccgctagactaacccgtctagtagacctggcagatgaggctggataaaccccactggcgacagtgatccagcctgcgtggctgcctgcacacctggaaacaggtgtgaagcccatgaatggacagggtgtgaagagccccgtgtgctaagtgtgagtcctccggcccctgaatgcggctaatctaaccccacagctaatacacacaaaccagtgtggatttagtcgtaatgggtaactgtgggacggaaccgactactttgggtgtccgtgtttccttttattccttttatattgcttatggtgacaggtatatagatatatatttgttacc

SEQ ID NO: 440 - RNA, 610 nt, synthetic construct
  source 1..610: mol_type = other RNA
ttaaaactgggtttgggttgatcccacccaaacctcccaagcggagtggtactctgttatttcggtaactttgtacgccagttttatattccctcccccctttaaactgtaaagctaagcacacagaccaatagctgacaatcatccagattgttaatggtcaagcacttctgtttccccggtcaacgttgatatgctccaacagggcaaaaacaactgcgatcgttatccgcaaagtgcctacgcaaagcctagtagcacctttgaagtcatttggttggtcgctccgctgttccccacagtagacctggcagatgaggctagaaataccccactggtgacagtgttctagcctgcgtggctgcctgcacaccctttgggtgtgaagccaaatcatggacaaggtgtgaagagccccgtgtgctcactttgagtcctccggcccctgaatgtggctaaccttaaccctgcagctagagtgcacaatccagtgcatttctagtcgtaatgagcaattgcgggatgggaccaactactttgggtgtccgtgtttcactttttacctattatttgcttatggtgacaatatatataattatatattggcacc

SEQ ID NO: 441 - RNA, 617 nt, synthetic construct
  source 1..617: mol_type = other RNA
ttaaaactggatccaggttgttcccacctggatcacccaatgggtgtagtatactgttattacggtaactttatacgacggttttatctcccccccccccttatgtaacttagaagttttgcacaccgaccaatagtggacaatcagccagattgttttaggtcaagcactactgtttcccccggtcaacgttgatatgctccgacagggcaaaaacaacagcgatcgttatccgcaaggtgcctacacagagcttagtaccgccttagaaggattgtggttggtcgctcagttgcaaccccagcaatagacctggcagatgaggctggacattccccactggtgacagtggtccagcctgcgtggctgcctgcacacctctatgaggtgtgaagccagaatttcgacaaggtgcgaagagccgcgtgtgctcaccttgaatcctccggcccctgaatgcggctaaccttaaacccgcagccatggtccacaatccagtggatgtatggtcgtaatgagtaattgtgggatgggaccgactactttgggtgtccgtgtttcctgttttttcttttatactgcttatggtgacaatatatatgatatatattggcacc

SEQ ID NO: 442 - RNA, 619 nt, synthetic construct
  source 1..619: mol_type = other RNA
ttaaaactggatccaggttgttcccacctggatctcctacaaggagttgtactctattattgcggtaattttgtacgccagttttatctcccctccccgatatgtaacttagaagctgaacacaaagaccaataggtgacatttaatccaaaatgttaaaggtcaagcacttctgtttccccggccaaagttgatatgctccaacagggcaaaaacagctgcggtcgttatccgcaaaacaactacgcaaagcctagtaccaccttctagagcatgtggctggtcgctccactataaacccaatagtagacctggcagatgaggctaggagctcctcactggtaacagtgtcctagcctgcgtggctgcctgcgcaccctgacaggtgcgaagccaaatgtttgacaaggtgtgaagagccccgtgtgcttgttttgagtcctccggcccctgaatgtggctaaccttaaccctgcagctagtgtgtacaatccagtgcatagctagtcgtaatgagcaattgcgggatgggaccaactactttgggtgtccgtgtttcttattttttccttatatttgcttatggtgacaatgtatatataacgtatatattggcatc

SEQ ID NO: 443 - RNA, 613 nt, synthetic construct
  source 1..613: mol_type = other RNA
ttaaaactggatccaggttgttcccacttggatcccccaagaggggtagtactctattattacggtaattttgtacgccagttttatctcccttaccccctttgtaacttagaagatttaaacacagaccaataggcgacgatcatccagatcgtttaaggtcaagcacttctgtttccccggtcaatgctgatatgctctaccagggcaaaaacagtagagatcgttatccgcaaggtgcctacacaaagcttagtaacattttgaagagcatttggttggtcgctcagctattaccccatagtagacctggcagatgaggctagaagttccccactggcgacagtgttcttgcctgcgtggctgcctgcgcactctcatgagtgcgaagccatatgtttgacaaggtgtgaagagccccgtgtgctcaccttgagtcctccggcccctgaatgtggctaaccttaaccctgcagctagtgcatgaaatccatcatgtaactagtcgtaatgagcaattgcgggatgggaccaactactttgggtgtccgtgtttcactttttccttttatatttgcttatggtgacaatatatatagcatatattgacacc

SEQ ID NO: 444 - RNA, 622 nt, synthetic construct
  source 1..622: mol_type = other RNA
ttcaaactgaatcatggttgttcccaccatgattacctacgggtgtagtacacttgtatcccggtacatttgtgcgccagttttatatcccctaccccaattgtaacttagaagttaagcaacacaagatcaataggcggtggttatccaaaccatcaatgatcaagtacttctgtctccccggtaggtgtgaatatgctttaaccaaggcagaagctaatcctatcgttatccgcaaggtgcctacgggaagcctattaacactttgaaagaaatttggctggtcgctcagttgcgcaatcccacgcaatagacctggcagatggggctagacaaaccccaccagcgatggtggtctagcccgcgtggctgcctgcacacccttttttgggtgtgaagccagaaattggacagggtgcgaagagcctactgtgctcaccttgagtcctccggcccctgaatgtggctaatcctaaccctgcagctgttgcacaagatccattgtgtatacagtcgtaatgagcaattgcgggatggaaccaactactttgggtgtccgtgtttccttgttttcttttatcattgcttatggtgacaagtatatatagatatatttgtcatc

SEQ ID NO: 445 - RNA, 615 nt, synthetic construct
  source 1..615: mol_type = other RNA
ttaaaactgaatccaggttgttcccacctggatttcccacgaggagcagtactctactattccggtagttttgtacaccagttttatctcccttccccgtgtaacttagaagacaagcacttcagaccaataggatggtaactaaccaagttatcaaaggtcaagcacttctgtttccccggtcaaaattgatatgctccaccagggcaaaaacagttttgatcgttatccgcaaagtgcctacgcaaagcttagtaacactttgaagaatgtgtggttggtcgttccgctattccccatagtagacctggcagatgaggctagaaaatccccactggtgacagtgttctagcctgcgtggctgcctgcgcacctctttgaggtgcgaagccattcctttgacaaggtgtgaagagccccgtgtgctcactttgagtcctccggcccctgaatgtggctaaccttaaccctgcagctagtgcatgcaatccagcatgtctctagtcgtaatgagtaattgcgggatgggaccaactactttgggtgtccgtgtttctctttttacttttaaattgcttatggtgacaatatatatagtacatatatattgacacc

SEQ ID NO: 446 - RNA, 617 nt, synthetic construct
  source 1..617: mol_type = other RNA
ttaaaactggatctaggttgttcccacccagatcacctacatggtgttgtacactattattacggtaattttgtacgccagttttatacccccttcccaaaatgtaacttagaagcaatacaaactgatcaataggaagcaatcatccagattgctaacgatcaagcacttctgtctccccggtcaaggttgatatgctccaccagggcaaaaacagctaagatcgttatccgcaagatgcctacgcaaagcctagtaatgctttcgaagatacttggttggtcgctcagctgtgcacccgacagtagacctggcagatgaggctagaagtacccctctggtgacagagttctagcctgcgtggctgcctgcacaccctattgggtgtgaagccaaatattggacaaggtgtgaagagccccgtgtgctcatcttgagtcctccggcccctgaatgtggctaaccttaaacctgcagccagtgcacacaaaccagtgtgtagctggtcgtaacgagcaattgcaggatgggaccaactactttgggtgtccgtgtttcactttttacccttatattgcttatggtgacaatatatatagtatatatatattgttatc

SEQ ID NO: 447 - RNA, 620 nt, synthetic construct
  source 1..620: mol_type = other RNA
ttaaaactgggagtgagttgtccccactcactctacccacgcggtgttgtacactgttattacggtaactttgtatgccagtttttgttcccctatccccctttaaagtaacttagaagcatgaacttacagaccaaaaggtgatgatcacccagatcattaaaggtcaagcacttctgtttccccggtcaatgttgatatgcttcaacaaggcaaaaacaacagcgatcgttatccgcaagatgcctacacaaagcttagtacctcctttgatggtatttgtctggtcgctcaggtgtttccccaacactagacctggcagatgaggctagaaactccccactggcgacagtgttctagcctgcgtggctgcctgcacaccctttcgggtgtgaagccaaatactggacaaggtgcgaagagccccgtgtgctcatcttgagtcctccggcccctgaatgcggctaaccttaaacccgcagccattactcacaatccagtgagcagatggtcgtaatgagcaattgtgggatgggaccgactactttgggtgtccgtgtttcatgttttactttatgacttgcttatggtgacaatatatagagatatatattggcatc

SEQ ID NO: 448 - RNA, 614 nt, synthetic construct
  source 1..614: mol_type = other RNA
ttaaaactggatccaggttgttcccacctggatttcctacatggagttgtactctgttattccggtaaccttgtacgccagttttatatcccttcccccttgcaacttagaagttaagcacgcagaccaataggtggtgattatccaaatcactaacggtcaagcacttctgtttccccggtttaaactgatacgctccaacagggcgaaaacagtgcaaatcgttatccgcaaggtgcctacacaaagcttagtagcgctttggagaatgtgtggttggtcgctcagctataccccctagtagacctggcagatgaggctagaagcaccccactggcgacagtgttctagcctgcgtggctgcctgcacacccttatgggtgtgaagccatacatttgacaaggtgtgaagagccccgtgtgctcactttgagtcctccggcccctgaatgtggctaaccttaaccctgcagctggtgcatgtaatccaacatgttgctagtcgtaatgagcaattgcgggatgggaccaactactttgggtgtccgtgtttcactttttaccttttaatttgcttatggtgacaatatatatacaacatatatattggcatc

SEQ ID NO: 449 - RNA, 621 nt, synthetic construct
  source 1..621: mol_type = other RNA
ttaaaactgggagtgagttgtccccactcactctacccacgcggtgttgtacactgttattacggtaactttgtatgccagtttttgttcccctatccccctttaaagtaacttagaagcatgaacttacagaccaaaaggtgatgatcacccagatcattaaaggtcaagcacttctgtttccccggtcaatgaggatatgctttacccaaggcaaaaaccttaaagatcgttatccgcacattaactacgcaaagcctagtatcgcctttgatgtattaagactggtcgttccctgcatacccagcagtagacctggcagatgaagctggacgttccccactggcgacagtggtccagcctgcgtggctgcctgctcacccatttgggtgagaagccttattattgacaaggtgtgaagagccccgtgtgcttaatgtgaatcctccggcccctgaatgtggctaaccttaaccccgcagccgttactcacaatccagtgaaatgacggtcgtaacgcgaaagtgtgggatgggaccaactactttgggtgtccgtgtttcctattttttccttaatgtgtgttatatggtgacaatttatagcgtataagttgtcatc

SEQ ID NO: 450 - RNA, 618 nt, synthetic construct
  source 1..618: mol_type = other RNA
ttaaaactgggagtgggttgttcccactcactccacccatgcggtgttgtactctgttattacggtaactttgtacgccagtttttcccacccttccccataatgtaacttagaagtttgtacaatatgaccaataggtgacaatcatccagactgtcaaaggtcaagcacttctgtttccccggtcaatgaggatatgctttacccaaggcaaaaaccttagagatcgttatccccacactgcctacacagagcccagtaccatttttgatataattgggttggtcgctccctgcaaacccagcagtagacctggcagatgaggctggacattccccactggcgacagtggtccagcctgcgtggctgcctgctcacccttcttgggtgagaagcctaattattgacaaggtgtgaagagccgcgtgtgctcagtgtgcttcctccggcccctgaatgtggctaaccttaaccctgcagccgttgcccataatccaatgggtttgcggtcgtaatgcgtaagtgcgggatgggaccaactactttgggtgtccgtgtttcctgtttttcttttgattgcattttatggtgacaatttatagtgtatagattgtcatc

SEQ ID NO: 451 - RNA, 616 nt, synthetic construct
  source 1..616: mol_type = other RNA
ttaaaactgggttcaggttgttcccacctgaatctcctacatggagttgtactctattatcccggtaattttgtacgccagttttatcctcccctccccatgtaacttagaagctgtacacaacgaccaacaggtaacattcatccagagtgttaaaggtcaagcacttctgtttccccggtcaaagttgatatgctccaacagggcaaaaacaactgcgatcgttatccgcagagcaactacgcaaagcttagtaccactttcaatggtgtatggctggtcgctccactataaacccaatagtagacctggcagatgaggctagaaactccccactggtaacagtgttctagcctgcgtggctgcctgcgtgcccttttgggcacgaagccttacatttgacaaggtgcgaagagccccgtgtgcttgctttgagtcctccggcccctgaatgtggctaaccttaaccctgcagctagtgtgtgcaatccagcacatggctagtcgtaatgagcaattgcgggatgggaccaactactttgggtgtccgtgtttcttgtttttcttttatatttgcttatggtgacaatatatatagaatatatatattggcatc

SEQ ID NO: 452 - RNA, 615 nt, synthetic construct
  source 1..615: mol_type = other RNA
ttcaaactggatctgggttgttcccacccagatcacccaagaggtgtagtgctctgtcattccggtgaccttgcacgccagttttatcaccccttccctcttgtaacttagaagaattaaactcagaccaataggaagcgacaagccagtcgtgacaggtcaagcacttctgtttccccggtcaaagttgatatgcttcaccaaggcaaaaacaacagcgatcgttatccgcaagatgcctacgcaaagcctagtagtgcctttgaaaatatttgtctggttgctcaagtacaaccccagtactaaacctggcagatgaggctggagcttccccactggtaacagtgttccagcctgcgtggctgcctgcacacccttacgggtgtgaagccaaatattggacaaggtgtgaagagccccgtgtgctcatcttgagtcctccggcccctgaatgcggctaaccttaaccccacagccattgctcacaatccagtgagtgtatggtcgtaacgagcaattgtgggatgggaccgactactttgggtgtccgtgtttctcttttttcctttttaattctgcttatggtgacaatatatagtgttatatattggcatc

SEQ ID NO: 453 - RNA, 617 nt, synthetic construct
  source 1..617: mol_type = other RNA
ttaaaactgggtctgggttgtccccacctagatcacccaagtggtgtagtacactgttatttcggtaaccttgtacgccagttttataaccccctccccaaatgtaacttagaagctgtacacaacgaccaatagagggtaatcatccagattacttacggtcaagcacttctgtctccccggtttactttgatatgctccaacagggcaaaaacaaagtgaatcgttacccgcaagatgcctacgcaacgcctagtaacatcctgaattgtttatggttggtcgctcaattacaaccccagtaatagacctggcagatgaggctagatattccccactggcgacagtgatctagcctgcgtggctgcctgcacaccccttgtgggtgtgaagccataatcatgacagggtgcgaagagccacgtgtgctcatcttgagtcctccggcccctgaatgcggctaaccctaaccctgcagccattgcctacaaaccagtgggtatgtggtcgtaacgagaaattgcgggatgggaccgactactttgggtgtccgtgtttcactttttaccttatatttgcttatggtgacaatatatacgagtttatatattgacacc

SEQ ID NO: 454 - RNA, 611 nt, synthetic construct
  source 1..611: mol_type = other RNA
ttaaaactgaatccagattgttcccatctggatttcctacatggagttgtactctattattccggtaattttgtacgccagttttatcaccccttcccccgtaacttagaagtttgaaacaaaagaccaataggaggtaactatccaagttactataggtcaagcacttctgtttccccggtcaaagttgatatgctccaccagggcaaaaacaattgagatcgttatccgcaaagtgcctacgcaaagcctagtagtatcttgaaaagcatgtggttggttgctccgctgtaccccacagtaaacctggcagatgaggctagaagttccccactggtgacagtgttctagcctgcgtggctgcctgcgcactctttgagtgcgaagccatatgtttgacaaggtgtgaagagccccgtgtgctcactttgagtcctccggcccctgaatgtggctaaccttaaccctgcagctagtgcatgcaatccagcatgtggctagtcgtaatgagcaattgcgggatgggaccaactactttgggtgtccgtgtttcacttttttccttttataattgcttatggtgacaatatatagtgatatatattgacacc

SEQ ID NO: 455 - RNA, 615 nt, synthetic construct
  source 1..615: mol_type = other RNA
ttaaaactggatcatggttgttcccaccatgattacctacgggtgtagtatacttgtatcccggtacatttatacgccagttttataacccccaccccaaatgtaacttagaagcatgtacacaatgatcaatagggtggtggctatccaagtcatctaagatcaagcacttctgtctccccggtgagtgtgaatatgctttacccaaggcaaaagctaatctcatcgttatccgcaaggtgcctacgggaagcctagtaacattctgaagatattttggttggtcgatcagttgcactcacccatgcaatagacctggcagatggggctaggcatacctcactggtaacagtggcctagcccgcgtggctgcctgcacaccttcgggtgtgaagccataatattgacagggtgcgaagagcctactgtgctcaccttgagtcctccggcccctgaatgtggctaatcctaaccccgtatccattgcacacaaaccagtgtgtctatggtcgtaatgggtaactacgggatggaaccaactactttgggtgtccgtgtttcttgtttttctttaatactgcttatggtgacattatatattgatatagtgtcatc

SEQ ID NO: 456 - RNA, 603 nt, synthetic construct
  source 1..603: mol_type = other RNA
tgtacccacccacactgtccacggacgtagtgctctcatattacggtatgtttgcacgccagtttttcccccccttcccccttttgtaactttagaagcttgtacttaatctgaccaataggcagtagtaatccatactacttacggtcaagcacttctgttaccccggtatgcggagaataggctctaaaagggctgaagcttcaagtatcgttatccgcacaattactacgcaaagcttagtaacttcccaagaaattctttggttggtcgctccgctggtaccccaccagtagacttggcagatgaggctgagtaatccccactggcgacagtgactcagcctgcgtggctgcctacacacctggcaacaggtgtgaagccatagaaaggacagggtgtgaagagccccgtgtgctaattgtgattcctccggcccctgaatgcggctaatccaaccccacatccaatgcgcataaaccaatgcgtatttggtcgtaatgggtaactgtgggacggaaccgactactttgggtgtccgtgtttccttttattctttaaattagttcatggtgacaagtataagaatttatatttgtcatc

SEQ ID NO: 457 - RNA, 621 nt, synthetic construct
  source 1..621: mol_type = other RNA
ttaaaactgagtgtgggttgtccccacccacactgtctacggacgtagtactctcatatcacggtatgtttgtacgccagtttgcctcccctcccaagtgtaacttagaagtttgtactttataaaggccaataggcgggtagtcaaccacactactcatggtcaagcacttctgtttccccggtatgcgaagaataagctttaacaaaggctgaagcttcaattatcgttatccgcatgataactacgcaaagcttagtagcattttgaaagtttattggttggtcgctccactggaaaacccccccagtagacctggcagatgaggctaagtaatccccactggcgacagtgacttagcctgcgtggctgcctgcacacctggagacaggtgtgaagccaagtaatggacaaggtgtgaagagccccgtgtgcttatcatgagtcctccggcccctgaatgcggctaatccaaccccacagctattgcacataatccaatgtgtatttagtcgtaacgggcaactgtgggacggaaccgactactttgggtgtccgtgtttcctttattctcatttaagtttcctatggtgacaaatataagtgattatatctgtcatc

SEQ ID NO: 458 - RNA, 389 nt, synthetic construct
  source 1..389: mol_type = other RNA
atccgcaaagcaactacgcaaagcctagtatcacttttgagaatatatggttggtcgctccactataaacccaatagtagacctggcagatgaggctagaagttccccactggtaacagtgttctagcctgcgtggctgcctgcgtgctccttgtgggcacgaagccatatatttgacaaggtgtgaagagccccgtgtgcttgttttgattcctccggcccctgaatgtggctaaccttaaccctgcagctagcgtgtgcaatccagcacaaagctagtcgtaatgagcaattgcgggatgggaccaactactttgggtgtccgtgtttcttgtttttcttttatacttgcttatggtgacaatatatataatatatatattggcatc

SEQ ID NO: 459 - RNA, 544 nt, synthetic construct
  source 1..544: mol_type = other RNA
ttgtttgatgccagttttatctccccccccaattgcaacttagaagatgtacacaaagaccaataggcagtggtcacccagaccactgaaggtcaagcacttctgtctccccggtcaaagttgatatgctccaacagggcaaaaacaacttagatcgttatccgcaaagtgcctacgcaaagcttagtaccatctttgagagcctatggttggtcgctccactgaaccccacagtagacctggcagatgaggctagaagacccccactggcgacagtgttctagcctgcgtggctgcctgcacacccttacgggtgtgaagccatatgtttgacaaggtgcgaagagccccgtgtgctcactttgagtcctccggcccctgaatgtggctaaccttaaccctgcagctagtgcacacaagccagtgtgttgctagtcgtaatgagcaattgcgggatgggaccaactactttgggtgtccgtgtttcactttttacctttattttgcttatggtgacaatatatatagtatatatattggcacc

SEQ ID NO: 460 - RNA, 626 nt, synthetic construct
  source 1..626: mol_type = other RNA
ttaaaacagcggatgggtaccccaccatccgacccactgggtgtagtactctggtacttcgtacctttgtacgcctgttcttcccattgtacccttcctgaacttccaacccaagtaacgttagaagctcaacatttagtacaacaggaagcaccacatccagtggtgtttagtacaagcacttctgtttccccggagcgaggtataggctgtacccactgccaaaaacctttaaccgttatccgccaaccaactacgtaaaagctagtagtattatgtttttaactaggcgttcgatcaggtggatttcccctccactagtttggtcgatgaggctaggaattccccacgggtgaccgtgtcctagcctgcgtggcggccaacccagcttatgctgggacgcctttttatagacatggtgtgaagactcgcatgtgcttggttgtgattcctccggcccctgaatgcggctaaccttaaccctggagccttgtgtcacaaaccagtgatgataaggtcgtaatgagcaattccgggacgggaccgactactttgggtgtccgtgtttcttatttttcttattattgtcttatggtcacagcatatatataacatatactgtgatc

SEQ ID NO: 461 - RNA, 625 nt, synthetic construct
  source 1..625: mol_type = other RNA
ttaaaacagcggatgggtttcccaccatccgacccactgggtgtagtgctctggtattttgtacctttgcacgcctgtttcccatttgtacccttccttaatctccttcccccgtaacgttagaagttttggaattttaaagtacaataggaagcgccacatccagtggtgttgcgtacaaatacttctgtttacccggagcgaggtataggttgtacccacggccaaaagcctttaaccgttatccgccaatcaactacgtaacggctagtatcatcttgcttttgatttggtgttcgatcaggtggtatcccccactagtctggtcgatgaggctaggaattccccacgggcgaccgtgtcctagcctgcgtggcggccagcccagcttttgctgggacgccttttcaaagacatggtgtgaagacctgcatgtgcttggttgtgagtcctccggcccctgaatgcggctaaccttaaccctggagcccagcagcataatccaatgttgtttgggtcgtaatgagcaattccgggacgggaccgactactttgggtgtccgtgtttccttttattcttacattgtcttatggtcacagcatatatattatatatactgtgatc

SEQ ID NO: 462 - RNA, 631 nt, synthetic construct
  source 1..631: mol_type = other RNA
ttaaaacagcgggtgggtatcccaccacccgacccactgggtgtggtacactggtactttgtacctttgtatgcctgtttgcttccactcccctttacctaatattcttccccaagtatattttgcggtaacgttagaagaagcaaagttagtgcaataggatgtatcacaaccagtggtataaagcacaagcaattcttgttccccggagctggatatagactgctaacgtggtcaaaagtccttaaccgttatccgccagctaactgcgagaagactagtaacaccatgtttgtttttagacgttcgatcaggtgaataccccattcactagtttggtcgatgaggctgagaataccccacaggtaactgtgtctcagcctgcgtggcggccaacccgactcatgtcgggacgcctactaatagacatggtgtgaagatcctattgcgcttagttgtgagtcctccggcccctgaatgcggctaaccctaaccccggagccttgtggtgtaaaccaacatttgcaaggtcgtaatgagtaattctgggatgggaccgactactttgggtgtccgtgtttcctttatttttattgtgtgtgtcttatggttacaaatacaatttgtaatc

SEQ ID NO: 463 - RNA, 627 nt, synthetic construct
  source 1..627: mol_type = other RNA
ttaatacagcggatgggtatcccaccatccgacccactgggtgtagtactctggtattatgtacctttgtacgcctgttcttcccattgtacccttcccaaatttccaacccaagtaacgttagaagtttgacattaaagtacaataggaggcaccacatccagtggtgttttgtacaagcacttctgtttccccggagcgaggtataggctgtacccactgccaaaaacctttaaccgttacccgccagccaactacgtaaaagctagtaacatcttgtttgtaacttggcgttcgatcaggtggattccccctccactagtttggtcgatgaggctaggaactccccacgggtgaccgtgtcctagcctgcgtggcggccaacccagctcttgctgggacgcccttttatagacatggtgtgaagactcgcatgtgcttggttgtgattcctccggcccctgaatgcggctaaccctaaccctggagccttgtgttacaaaccagtaatattaaggtcgtaatgagcaattccgggacgggaccgactactttgggtgtccgtgtttctcatttttcttattattgtcttatggtcacagcatatttgttaaatatactgtgatc

SEQ ID NO: 464 - RNA, 628 nt, synthetic construct
  source 1..628: mol_type = other RNA
ttaaaacagcggatgggtatcccaccattcgacccattgggtgtagtactctggtactatgtacctttgtacgcctgtttctccccaaccacccttccttaaaattcccacccatgaaacgttagaagcttgacattaaagtacaataggtggcgccatatccaatggtgtctatgtacaagcacttctgtttcccaggagcgaggtataggctgtacccactgccaaaagcctttaaccgttatccgccaaccaactacgtaacagttagtaccatcttgttcttgactggacgttcgatcaggtggattttccctccactagtttggtcgatgaggctaggaattccccacgggtgaccgtgtcctagcctgcgtggcggccaacccagcttatgctgggacgcccttttaaggacatggtgtgaagactcgcatgtgcttggttgtgagtcctccggcccctgaatgcggctaaccttaaccctagagccttatgccacgatccagtggttgtaaggtcgtaatgagcaattccgggacgggaccgactactttgggtgtccgtgtttctcatttttcttcatattgtcttatggtcacagcatatatatacatatactgtgatc

SEQ ID NO: 465 - RNA, 618 nt, synthetic construct
  source 1..618: mol_type = other RNA
tttaaacagcggatgggttccccaccatccgacccactgggtgtagtactctggtattttgtacctttgtacgcctgtttctcccctacctcccaacctaaacaatcctggtaacttagaagacttaaatcatcgtacaataggtgctgtcacatccagtgacggctagtacaagcacttctgtttccccggagcggagtataaatggccaccgctgtcaaaagctcttaaccgttatccgccaattaactacgcaacggctagtaacatcttgttatttttagggcgttcgatcaggtgagtaaacccctcactagtctggtcgatgaggctgagaattccccacgggcgaccgtgtctcagcctgcgtggcggccagcccagctaatgctgggacgccttaattgtgacatggtgtgaagacccacgtgtgcttaattgtgagtcctccggcccctgaatgcggctaacctaaaccctggagccttgagacacaatccagtgttggcaaggtcgtaatgagtaattccgggacgggaccgactactttgggtgtccgtgtttccttttattttcaaattgttcttatggtcacaatataagtaatatattgtgatc

SEQ ID NO: 466 - RNA, 632 nt, synthetic construct
  source 1..632: mol_type = other RNA
ttaaaacagcgggtgggtatcccaccacccgacccactgggtgttgtacactggtattttgtacctttgtatgcctgtttgcacctccccaccccttccaattacccttacccgaattatattatgcggtaacattagaagaagtgaacacagtgcaataggacgtatcacatccagtgatataaagcacaagcaattcttgttccccggagctggatatagactgctaacgtggttgaaggtccttaaccgttatccgccaaccaactacgagacggctagtaatatcatgtttgtctttgagcgttcgatcaggtgaattccccattcactagtttggtcgatgaggctgagaactccccacaggtgactgtgtctcagcctgcgtggcggccaacccagccacggctgggacgcccactgatagacatggtgtgaagacccaattgtgcttggttgtgactcctccggcccctgaatgcggctaacctcaaccccggagccttgtagtgtaagccaacacatacaaggtcgtaatgggcaactctgggacgggaccgactactttgggtgtccgtgtttcctttatttttatcttttgtgtcttatggttacaagtattgattgtaacc

SEQ ID NO: 467 - RNA, 622 nt, synthetic construct
  source 1..622: mol_type = other RNA
ttaaaacagcggatgggttccctaccatccgacccactgggtgtagtactctggtactctgtacctttgtacgcctgtttatccactacccttttcctaaattttccacccgtgtaaccttagaagcaaacaaattgtacaatagggtgcatcacaaccagtgatgtacagtacaagcacttctgtttccccggagcggggtatagacggtcaccactgtcaaaagcccttaaccgttacccgccaaccaactacgtaacggctagtaacaccatgaatttgtcttgacgttcgatcaggtggtaaccccccactagtttggtcgatgaggctgagaactccccacgggtaaccgtgtctcagcctgcgtggcggccaacccagcttctgctgggacgccaattcattgacatggtgtgaagacctgcatgtgcttggttgtgattcctccggcccctgaatgcggctaaccctaaccccggagccacgcggcataatccaatgtcgtatgggtcgtaatgagtaattctgggatgggaccgactactttgggtgtccgtgtttcctgtttttccaaattattcttatggtcacagcatataaatagatatatactgtgatc

SEQ ID NO: 468 - RNA, 630 nt, synthetic construct
  source 1..630: mol_type = other RNA
tttaaacagcggatgggtatcccaccatccgacccactgggtgtagtactctggtattttgtacctttgtacgcctgttgttcctaatgtacccaccctaaaacttcctacccaagtaacgttagaagtttcatcaacaagtacaataggaagcatcacatccagtggtgttttgtacaagcacttctgtttccccggagcgaggtataggctgtacccactgccgaaagcctttaaccgttatccgccaaccaactacgtaaaagctagtatcatcatgttttaaaataggcgttcgatcaggtggatcccccctccactagtttggtcgatgaggctaggaactccccacgggtgaccgtgtcctagcctgcgtggcggccaacccagcttctgctgggacgcctttttatggacatggtgtgaagactcgcatgtgcttggttgtgactcctccggcccctgaatgcggctaaccttaaccccggagccctgtgttgcaatccagtaacattagggtcgtaatgagcaatttcgggacgggaccgactactttgggtgtccgtgtttctcatttttcttattattgtcttatggtcacagcatatatataacgtatatactgtgatc

SEQ ID NO: 469 - RNA, 632 nt, synthetic construct
  source 1..632: mol_type = other RNA
ttaaaacagcgggtgggtatcccaccacccgacccactgggtgtggtacactggtactttgtacctttgtatgcctgtttgcatccccttccctttacctaacatccctccccaagttatattttgcggtaacgttagaagaagtgaacatagtgcaacaggaagtatcaccaccagtgatataacgcacaagcaattcttgttccccggagctggatatagactgctaacgtggttgaaagtccttaaccgttatccgccagttaactgcgaaaagactagtaacatcatgcacatttctaggtgttcgatcaggtgaaaaccccattcactagtttggtcgatgaggctgagagtaccccacaggcgactgtgtctcagcctgcgtggcggccaacccgacttatgtcgggacgcctattaatagacatggtgtgaagatcctattgcgcttagctgtgagtcctccggcccctgaatgcggctaaccttaaccccggagtcttgtgatgtaagccaacatttgcaaggtcgtaatgagtaattctgggatgggaccgactactttgggtgtccgtgtttcctttattcttatcatttgtgtttcatggttacaagcattgtttgtaatc

SEQ ID NO: 470 - RNA, 622 nt, synthetic construct
  source 1..622: mol_type = other RNA
ttaaaacagcggatgggtatcccaccatccgacccactgggtgtagtactctggtactctgtacctttgtacgcctgtttctcctcaaccctcccctacccgttatatatctcagtaacttagaagatatcattaccgcacaatagggaccgttgtaaccagcaacggtcagtgcaagcacttctgtttccccggagcggagtatagacggccactgctgtcaaaagctcttaaccgttacccgccagttaactacacaacagctagtaacatcttgttgttcttagggcgttcgatcaggtgagtttaccccctcactagtctggtcgatgaggctgagaaatccccacgggtgaccgtgtctcagcctgcgtggcggccagcccagcttatgctgggacgccttaagtatgacatggtgtgaagactcgcgtgtgcttagctgtgagtcctccggcccctgaatgcggctaacctaaaccccggagccttgaggcacaatccagtgcccgcgaggtcgtaacgagaaattctgggacgggaccgactactttgggtgtccgtgtttccttttatctttttgatgttcttatggttacaatatataaagtatattgtaatc

SEQ ID NO: 471 - RNA, 624 nt, synthetic construct
  source 1..624: mol_type = other RNA
ttaaaacagcggatgggtatcccaccatccgacccactgggtgtagtactctggtattatgtacctttgtacgcctgtttctcccccccattacccctccccacatatcccagtaacttagaagaattaaattatcgcacaataggagctattacaaccagtaatagttagtgcaagtacttctgtttccccggagcggagtatagatggccaccgctgtcaaaagctcttaaccgttatccgccagttaactacgtaacggctagtaacatcttgttgtgcttaaggtgttcgatcaggtgaagagacacccccttcactagtctggtcgatgaggctgagaaatccccacgggcgaccgtgtctcagcctgcgtggcggccagcccagcttatgctgggacgccttaagtatgacatggtgtgaagacccgcatgtgcttaactgtgagtcctccggcccctgaatgcggctaaccttaaccctggagccttggggtacaatccagtgctaacaaggtcgtaacgagcaattccgggacgggaccgactactttgggtgtccgtgtttccttttatttcattattgttcttatggttacaatatatagagtatattgtaatc

SEQ ID NO: 472 - RNA, 620 nt, synthetic construct
  source 1..620: mol_type = other RNA
ttaaaacagcggatgggtatcccaccatccgacccactgggtgtagtactctggtactttgtacctttgtacgcctgtttctccctcccttcccaacctaaacaatccttgtaacttagaaggtttcgattatcgcacaatagggactattgcaaccagcaatagtcagtgcaagcacttctgtttccccggagcggagtgtagatggccaccgctgtcaaaagctcttaaccgttatccgccagttaactacgcaacggctagtagtgccttgttgcttttatggcgttcgatcaggcgagatttaccccctcgctagtctggtcgatgaggctgagaattccccacgggcgaccgtgtctcagcctgcgtggcggccagcccagcctttgctgggacgccttgattgcgacatggtgtgaagacccgcgtgtgcttaactgtgagtcctccggcccctgaatgcggctaacctaaaccctggagccttgaaacacaacccagtgttcgcaaggtcgtaacgagcaattccgggacgggaccgactactttgggtgtccgtgtttcctttattctttcaattgttcttatggtcacaatataagtgttatattgtgatc

SEQ ID NO: 473 - RNA, 622 nt, synthetic construct
  source 1..622: mol_type = other RNA
ttaaaacagctgatgggttccccaccatccgacccaatgggtgtagtactctggtattctgtacctttgtacgcctgtttctccccacccccccgtcctaaataatcccagtaacttagaagatttgaattatcgtacaataggtgctgtcacatccagtgatggctagtacaagcacttctgtttccccggagcggagtatagatggccaccgctgtcaaaagctcttaaccgttatccgccaattaactacgcaacggttagtaacatcttgtcatttttgaggcgttcgatcaggtgagtacacccctcactagtctggtcgatgaggctgagaattccccacgggcgaccgtgtctcagcctgcgtggcggccagcccagcttatgctgggacgccttaattgtgacatggtgcgaagacccacgtgtgcttaattgtgagtcctccggcccccgaatgcggctaacctaaaccccggagccttgagacacaatccagtgttagcaaggtcgtaacgagcaattctgggacgggaccgactactttgggtgtccgtgtttcctgttattctcaaattgttcttatggtcacaatataagtaatatatatattgtgatc

SEQ ID NO: 474 - RNA, 630 nt, synthetic construct
  source 1..630: mol_type = other RNA
ttaaaacagcggatgggttctcccaccatccgacccactgggtgtagtactctggtatgatgtacctttgtacgcctgtttattcccaaacccccacccgttattcgcccaacccctgtaacgttagaagtttggaacttaattgtacaatagggagcaccatatccaatggtgtaacgtacaagcacttctgtttccccggagcgaggtataggtggtacccactgccgaaagcctttaaccgtcatccgccaatcaactacgtaacagctagtaacatcttgttgttgattggacgttcgatcaggtggttcaccccccactagtttggtcgatgaggctgggaatcccccacgggtgaccgtgtcccagcctgcgtggcggccaacccagcttatgctgggacgccctttcaatgacatggtgtgaagactcgcatgtgcttgattgtgagtccgccggcccctgaatgcggctaaccctaaccctggagccttgcaccacaatccagtggtgtctgggtcgtaatgagtaattctgggatgggaccgactactttgggtgtccgtgtttctcatttttcttttaattgtcttatggtcacagcatatagtattatatactgtgatc

SEQ ID NO: 475 - RNA, 624 nt, synthetic construct
  source 1..624: mol_type = other RNA
ttaaaacagcggacgggtatcccaccatccggctcactgagcgtagtactctggtattgtgtacctttgtacgcctgttttccccaaatcccctaccctttatatctcctaccccgtaacgtaagaagttttcaaacagtacaataggaagcaccacatccagtggtgttatgtacaagcacttctgtttccccggagcgaggtataggtggtcaccaccgccaaaagcctttaaccgttacccgccaaccaactacgtaatggctagtaacatcattgatttagattggcgttcgatcaggtggtatccccccactagtttggtcgatgaggctaggaataccccacgggtgaccgtgtcctagcctgcgtggcggccaacccagcatacgctgggacgccagtttactgacatggtgcgaagacttgcatgtgcttggttgagagtcctccggcccctgaatgcggctaaccttaaccccggagcctcgcagcataatccaatgttgtagaggtcgtaacgagtaattctgggatgggaccgactactttgggtgtccgtgtttcctgtttttctttaaaatgtcttatggtcacagcatatatactgtatatactgtgatc

SEQ ID NO: 476 - RNA, 626 nt, synthetic construct
  source 1..626: mol_type = other RNA
ttaaaacagcggatgggtatcccaccatccgacccactgggtgtagtactctggtattttgtacctttgtacgcctgtttcttccctttgtacccgccccttaaacttccaccccacgtaacgttagaagtttatacaagcagtacaataggttgcaccataaccagtggtgtttcgtacaagcacttctgtttccccggagcggggtatagacggtacccactgtcaaaagcccttaaccgttatccgccaatcaactacgtaatggctagtaacaccatgaaggtaagttgacgttcgatcaggtggtaacccccactagtttggtcgatgaggctaggaattccccacgggtaaccgtgtcctagcctgcgtggcggccaacccagcatttgctgggacgccaatttactgacatggtgtgaagacttgcatgtgcttgattgtgactcctccggcccctgaatgcggctaaccttaaccccggagccttgcagcataatccaatgttgtggaggtcgtaatgagcaattctgggatgggaccgactactttgggtgtccgtgtttcctgttttctttaagttgtcttatggtcacagcatatatactatatatactgtgatc

SEQ ID NO: 477 - RNA, 621 nt, synthetic construct
  source 1..621: mol_type = other RNA
ttaaaacagcggatgggtatcccaccatccggcccactgggcgtagtacactggtattctgtacctttgtacgcctgtttgccgcccctcccccttttattaccacatttgtggtcgctgcaacgttagaagattttaaagtagtgcaataggaagcatcacaaccagtggtgttatgcacaaacacttctgtttccccggagcgaggtatagacggtccccactgtcaaaagcctttaaccgttatccgccaaccaactacgagacagctagtaatgccctgttctcctgcaaggcgttcgatcagacagatttcccctctgttagtctggtcgatgaggctagaagtaccccacaggtaactgtgttctagcctgcgtggcggccagcccagcttctgctgggacgcctttcaagagacatggtgtgaagactcaattgtgcttggttgtgagtcctccggcccctgaatgcggctaaccttaaacccggatccatgctatgcaaaccagcatagttatggtcgtaatgggcaactctgggatgggaccgactactttgggtgtccgtgtttccatttttactttttgtgtcatttatggttacaattaagttgtaacc

SEQ ID NO: 478 - RNA, 631 nt, synthetic construct
  source 1..631: mol_type = other RNA
ttaaaacagcggatgggtaccctaccatccgacccactgggtgtagtacactggtacattgtacctttgtacgcctgtttctccctattgtaccttccctcacaatcctaacccctgtaacgttagaagatgtgcaactcgtgcaataggagatactgcaaccagtggtatcaagcacaagaacttctgtttcctcggagcggagtatagatggtccccaccgtcaaaagctcttaaccgttatccgccaatcaactacgtgacgactggtagcatcattttgacactttgacgttcgatcaggtaggcttaccccacctactagtttggccgatgaggctgggagtccctcacaggtaactgtgtcccagcctgcgtggcggccaacccagcaattgctgggacgccaatttgttgacatggtgtgaagatcttaatgtgcttggttgtgagtcctccggcccctgaatgcggctaaccttaaccccggagccttgtgtcacaagccagtgacattaaggtcgtaatgagtaatttcgggatgggaccgactactttgggtgtccgtgtttcctgtttttctttatgattgtcttatggtcacagcatatagtaattatatactgtgatc

SEQ ID NO: 479 - RNA, 620 nt, synthetic construct
  source 1..620: mol_type = other RNA
ttaaaacagcggatgggtttcccaccatccgacccactgggtgtagtactctggtacattgtacctttgtacgcctgtttctcccctccctcccaacctatacaatcccggcaacttagaagatttgaactattgtacaataggcgctgtcacatccagtggcggctagtacaagcacttctgtttccccggagcggagtatagatggccaccgctgtcaaaagctcttaaccgttatccgccaattaactacgcaacggctagtaatatcatgtaacttttagggtgttcgatcaggtgagtgtacccctcactagtctggtcgatgaggctgagaattccccacgggcgaccgtgtctcagcctgcgtggcggccagcccagcttatgctgggacgccttaattgtgacatggtgtgaagacccacgtgtgcttaattgtgagtcctccggcccctgaatgcggctaacctaaaccctggagccttgaaacacaatccagtgttagcaaggtcgtaatgagtaattccgggacgggaccgactactttgggtgtccgtgtttccttttatttttaagttgttcttatggtcacaatataagtaatatatattgtgatc

SEQ ID NO: 480 - RNA, 628 nt, synthetic construct
  source 1..628: mol_type = other RNA
ttaaaacagtggatgggtttcctaccatccgacccactgggtgtagtgctctggtatattgtacctttgcacgcctgttttcccattgtacccttccttaaattcctccccatgtaacgttagaagtttaagaacataaatgtacaataggaagcatcacatccagtggtgtatggtacaagcacttctgtttatccggagcgaggtataagcggtacccactgctgaaagcctttaaccgttaaccgccaatcaactacgtaacggctagtattaccttgtttgcaatctggcgttcgatcaggtggttccccccactagtttggtcgatgaggctaggagttccccacgggcgaccgtgtcctagcctgcgtggcggccaacccagcatttgctgggacgcctttttgtagacatggtgtgaagacctgcatgtgcttgattgtgagtcctccggcccctgaatgcggctaaccttaaccccggagccttgtgacataatccaatgtcattaaggtcgtaatgagcaattctgggacgggaccgactactttgggtgtccgtgtttctctttattctttacattgtcttatggtcacagcatatataatacatatatactgtgatc

SEQ ID NO: 481 - RNA, 625 nt, synthetic construct
  source 1..625: mol_type = other RNA
ttaaaacagcggatgggtttcccaccatccgacccactgggtgtagtgctctggtattttgtacctttgcacgcctgtttcccctttgtacccatcctgaatttcctccctctgcaacgttagaagtttgtgaaattaaaagtacaataggaagcatcacatccagtggtgttcagtacaagcactcctgtttccccggagcgaggtataggttgtacccacgaccgaaagcctttaaccgttatccgccaatcaactacataacggctagtatcatcatgtttttgatctggcgttcgatcaggtggtttcccccactagtctggtcgatgaggctaggatttccccacgggcgaccgtgtcctagcctgcgtggcggccagcccagcttatgctgggacgcctttttaaagacatggtgtgaagacctgcatgtgcttgattgtgagtcctccggcccctgaatgcggctaaccttaaccctggagcccgacagcataatccaatgttgtttgggtcgtaatgagcaattccgggatgggaccgactactttgggtgtccgtgtttctttttattcttatattgtcttatggtcacagcatatatagtatatatactgtgatc

SEQ ID NO: 482 - RNA, 625 nt, synthetic construct
  source 1..625: mol_type = other RNA
ttaaaacagcgggtgggtatcccaccacccgacccactgggtgtagtacactggtattttgtacctttgtatgcctgtttgccatccctccctctcctcttacccttacccttattttgcggtaactttagaagtttgtaaatcacgcgcaatagggtataccacatccagtggtatgaagcacaagcaattcttgttccccggagctggatataaactgctaacgtggttgaaagtccttaaccgttatccgccagttaactgcgagaagactagtaactccatgtttgtttttaagcgttcgatcaggtggataccccattcactagtttggtcgatgaggctgggaatcccccacaggtaactgtgtctcagcctgcgtggcggccaacccagcttttgctgggacgcttactgacagacatggtgtgaagatcctattgcgcttaactgtgagtcctccggcccctgaatgcggctaacctcaaccccggagccttgtggtgtaaaccaacactcgcaaggtcgtaacgagtaattctgggacgggaccgactactttgggtgtccgtgtttcctttatttcttattgattgtctcctatggttacaaatttactgtaatc

SEQ ID NO: 483 - RNA, 318 nt, synthetic construct
  source 1..318: mol_type = other RNA
tcccctccactagtttggtcgatgaggctaggaaatccccacgggtgaccgtgtcctagcctgcgtggcggccaacccagcatcagctgggacgccttttcagagacatggtgtgaagactcgcatgtgcttgattgtgattcctccggcccctgaatgcggctaacctcaaccccggagccttgtattgcaatccagcaatattaaggtcgtaatgagcaattctgggacgggaccgactactttgggtgtccgtgtttcctgtttttcataaatttttcttatggtcacagcatatagtacatatatactgtgatc

SEQ ID NO: 484 - RNA, 623 nt, synthetic construct
  source 1..623: mol_type = other RNA
aaaacagcggatgggtatcccaccatccgacccactgggtgtagtactctggtactttgtacctttgtacgcctgttcttcccattgtaccctcccttaacttccaacccaagcaacattagaagttatcaattttcagtacaataggaagcatcacatccagtgatgttgtgtacaagcacttctgtctccccggagcgaggtataagcagtacccactgctaaaagcctttaaccgttacccgccaatcaactacgtaacagctagtatcatcatgtttttgactggacgttcgatcaggtggttcccccccactagtttggtcgatgaggctaggaataccccacgggtaaccgtgtcctagcctgcgtggcggccaacccagcatttgctgggacgcccttttaaagacatggtgtgaagactcgcatgtgcttgattgtgattcctccggcccctgaatgcggctaaccttaaccccggagccttgtgttgcaatccagcaaaagcaaggtcgtaatgagcaattctgggacgggaccgactactttgggtgtccgtgtttctcattttacattacttttcttatggtcacagcatatataataaatatactgtgatc

SEQ ID NO: 485 - RNA, 341 nt, synthetic construct
  source 1..341: mol_type = other RNA
tctggcgttcgatcaggtggatttcccctccactagtttggtcgatgaggctaggaatccctcacgggcgaccgtgtcctagcctgcgtggcggccaacccagcatatgctgggacgcccttttatagacatggtgtgaagactcgcatgtgcttggttgtgattcctccggcccctgaatgcggctaaccttaaccctggagccttgtattacaaaccagtaatattaaggtcgtaatgagcaattccgggacgggaccgactactttgggtgtccgtgtttcttattttacttattattgtcttatggtcacagcatatttgttaaatatactgtgatc

SEQ ID NO: 486 - RNA, 624 nt, synthetic construct
  source 1..624: mol_type = other RNA
ttaaaacagcggatgggtatcccaccatccgacccactgggtgtagtactctggtattatgtacctttgtacgcctgtttctccctccctactaccccgcctcaagcatcctgtaacttagaagaattgaaaaaccgcacaacaggagctattacaaccagtaatagttagtgcaagcacttctgtttccccggagcggagtatagacggccaccgctgtcaaaagctcttaaccgttatccgccagttaactacgtaacggctagtaacatcttgttgtgcttagggtgttcgatcaggtgaagaaaaacccccttcactagtctggtcgatgaggctgagaagtccccacgggcgaccgtgtctcagcctgcgtggcggccagcccagcatatgctgggacgccttaagtatgacatggtgtgaagacccgcatgtgcttaactgtgagtcctccggcccctgaatgcggctaacctaaaccctggagccttggagcacaagccagtgcttacaaggtcgtaatgagcaattccgggacgggaccgactactttgggtgtccgtgtttccttttatctcattattgttcttatggttacaatatatagagtatattgtaatc

SEQ ID NO: 487 - RNA, 478 nt, synthetic construct
  source 1..478: mol_type = other RNA
gtgacaatcagccagattgttaacggtcaagcacttctgtttccccggtacccttgtatacgcttcacccgaggcgaaaagtgaggttatcgttatccgcaaagtgcctacgagaagcctagtagcacttttgaagcctatggctggtcgctcaactgtttacccagcagtagacctggcagatgaggctagatgttccccaccagcgatggtgatctagcctgcgtggctgcctgcacactctattgagtgtgaagccagaaagtggacaaggtgtgaagagcctattgtgctcactttgagtcctccggcccctgaatgtggctaatcctaaccccgtagctgttgcatgtaatccaacatgtctgcagtcgtaatgggcaactatgggatggaaccaactactttgggtgtccgtgtttcttgtttttctttatgcttgcttatggtgacaactgtagttattacatttgttacc

SEQ ID NO: 488 - RNA, 541 nt, synthetic construct
  source 1..541: mol_type = other RNA
accgcacgccagtttgccaccccctacccatcgtaacttagaagctatcaactcgaccaataggcggtggcaaaccataccacttacggtcaagcactcctgtttccccggtatgcgaggaatagactcctacagggttgaagcctcaagtatcgtcatccgcattggtactacgcaaagcttagtagtgccttgaaagtcccttggttggtcgctccgctagttccccctagtagacctggcagatgaggcaggacattccccactggcgacagtggtcctgcctgcgtggctgcctgcgcacccctaggggtgcgaagccaagtgacggacaaggtgtgaagagccccgtgtgctactaatgagtcctccggcccctgaatgcggctaatccaaccccacagctattgcacacaagccagtgtgtatatagtcgtaatgagcaattgtgggacggaaccgactactttgggtgtccgtgtttccttttattcttatcattctgcttatggtgacaatactgtgaaatagtgttgttacc

SEQ ID NO: 489 - RNA, 612 nt, synthetic construct
  source 1..612: mol_type = other RNA
ttaaagctggatcatggttgttcccaccatgattacccacgcggtgcagtggtcttgtattacggtacatttccataccagttttatacaccccaccccgaaactcatagaagtttgtacacaatgaccaataggtggtggccatccaggtcgctaatggtcaagcacttctgtttccccggcacccttgtatacgcttcacccgaggcgaaaaatgaggttgtcgttatccgcaaagtgcctacgaaaagcctagtaacactttgaaaacccatggttggtcgctcagctgtttacccaacagtagacctggcagatgaggctagacattccccaccagcgatggtggtctagcctgcgtggctgcctgcacaccctgccgggtgtgaagccagaaagtggacaaggtgtgaagagcctattgtgctcactttgagtcctccggcccctgaatgtggctaaccctaaccccgtagctgttgcatgtaacccaacatgtatgcagtcgtaatgggcaactatgggatgggaccaactactttgggtgtccgtgtttcctgttttactttttcattgcttatggtgacaattgtatctgatacacttgttacc

SEQ ID NO: 490 - RNA, 615 nt, synthetic construct
  source 1..615: mol_type = other RNA
ttaaaactgggctcgggttgtacccacccgagctgcccatgtggcgtggtgctcttgtatcccggtacacttgcacgccagtttgcctctccttaccccgtaacatatctagaagaatgtgcataacggaccaataggtggtggcaacccatgccactgacggtcaagtacttctgtttccccggtgtgatgtggaatagactctctcagggttgaagccataagcatcgttatccgctacgtgcctacgcaaaacctagtagcattttgaagcttacttggttggccgctcagccactaacccgtggtaggcctggcagatgaggctgggcgcaccccactggcgacagtggcccagcctgcgtggctgcctgcccctctttgaggggaagccatttaagtgacaaggtgtgaagagtctcgtgtgctccacgtagaatccttccggcccctgaatgtggctaatcctaaccccgcagctattgcacacaatccagtgtgttgatagtcgtaatgggcaactgtgggatggaaccaactactttgggtgtccgtgtttcctgttttctttaaatacttgcttatggtgacaaatagtgtatactgtttgacacc

SEQ ID NO: 491 - RNA, 616 nt, synthetic construct
  source 1..616: mol_type = other RNA
ttaaaactgggtacaggttgttcccacctgtaccacccaagtggtgtagtgctcttgtattccggtacatttgcacgccagtttgccacccctaccctctatgtaacttagaagcttacacaaagaccaataggcggtggtaaacccataccactaacggtcaaacacttctgtttccccggcatatgaggaataggctccaaaagggctgaagccactagtgtcgttatccgcattggtactacgcaaagcctagtatcggcctgaaaatttcttggttggtcgttcggccagttaccccactggtagacctggcagatgaggcaggacttaccccactggcgacagtggtcctgcctgcgtggctgcctgcacacccttatggggtgtgaagcctaggaacggacagggtgtgaagagccccgtgtgctaccaatgagtcctccggcccctgaatgcggctaatcttaccccgcagctgttgcacacaatccagtgtgtatgcagtcgtaatgagcaattgtgggatggaaccgactactttgggtgtccgtgtttccttgttttccttatatttgcttatggtgacaatattgatattatcagtgttgtcatc

SEQ ID NO: 492 - RNA, 611 nt, synthetic construct
  source 1..611: mol_type = other RNA
ttgaaactgaatcatggttgttcccaccatgattacccacgtggtgcagtggtcttgtattacggtacatttccataccagttttatacaccctaccccgaaacatatagaagcttgtacacaatgaccaataggtggtgaccatccaggttaccgacggtcaagcacttctgtttccccggtacccttgtatacgcttcaccagaggcgaaaaacgaggttatcgttatccgcaaagtgcctacgagaagcctagtagcactttcgaaacctatggctggtcgctcagctgctcacccagcagtagacctggcagatgaggctagacatcccccaccagtgatggtggtctagcctgcgtggctgcctgcacaccctatcgggtgtgaagccagaaagtggacaaggtgtgaagagcctattgtgctcactttgagtcctccggcccctgaatgtggctaatcctaaccccgtagctgttgcatgcaacccagcatgtatgcagtcgtaatgggcaactatgggatggaaccaactactttgggtgtccgtgtttcttgttttacttttcattgcttatggtgacaattgtagttgatacacttgttacc

SEQ ID NO: 493 - RNA, 608 nt, synthetic construct
  source 1..608: mol_type = other RNA
ttaaaactgggttatagttgctcccactataaccacccacgcggtgttgtggacttgtatttcggtacacttccatgccagttttatcttcccccctgcaacacttagaagaaatgtacttatggaccaataggcggcggccacccaggtcgttgacggtcaagcacttctgtctccccggtgatactggatacgctttacccaaggcgaaaaccgggctcatcgttatccgcaaagtgcctacgagaagtctagtagcactctgaaaacctatgactggtcgctccactgcaatcccagcagtagacctggcagatggggctagacataccccaccagcgatggtggtctagcccgcgtggctgcctgcacaccctatgggtgtgaagccagaaagtggacagggtgtgaagaacctattgtgctcactttgagtcctccggcccctgaatgtggctaatcctaaccctgcaaccgttgcgcacaacccagtgcgtatgcggtcgtaatgagcaattgcgggatggaaccaactactttgggtgtccgtgtttcttgttattcttttatttgcttatggtgacactgtatagctatacattgtcatc

SEQ ID NO: 494 - RNA, 619 nt, synthetic construct
  source 1..619: mol_type = other RNA
ttaaaactgagtatgggttgttcccacccatactgcctacgggcgtagtactcttgtgctccggtacatttgtacgccagtttttcacccccaccccctaggtaactcttagaagcacttgcacacagacgaataggcagccaacactccacgttggtcaacgtcaagcacttctgtttccccggtattaggggttaggcttttcaagaggctgaagcctgaagtatcgttacccgcgcaattactaagcagagcctagtatcacttcgacccttccactggctggtcgttcaatgagaaaacccactcatagacctggcagatggggctggaaataccccactggcgacagtgttccagcccgcgtggctgcctgtcccccattttgggggaaagccaatgtaaggacaaggtgtgaagagccgcgtttgctaattgtgagtcctccggcccctgaatgcggctaatcttaccccacagctattgcatggaagccaccatgtggatagtcgtaacgggcaactgtgggacggaaccgactactttgggtgtccgtgtttccttttattccatttattatctcatggtgacaacgtatacagattatatgttgtttacc

SEQ ID NO: 495 - RNA, 639 nt, synthetic construct
  source 1..639: mol_type = other RNA
ttaaaacagccgtgtggttgtacccaccaccgggcacattgtgcgtggtacactggaattacggttcctttgtacgcctgttttcccttcccactttctttcttccttcacttcctaattgtaacataattagaagcatgacatacagtccaataggaggcggttaatccataaccgtcatagacaagcacttctgtttccccggatgtgtgaataggcttccaccgaggctgaagctgtagcattcgttatccgcacacgtactacgcgaaaactagtaacaccttgattggtggtgtggtgtttcactcggcgctaccccagcgtagatcagggcaatggggctacggaaaccccaccggcgacggtgtcgtagcccgcgtggtgccctgcccagatccttgcgatctgggacaccatatcattgacagggtgtgaagattctagtgtgctacgtgtgagtcctccggcccctgaatgtggctaaccttaaccccgcagctatggtgtgcaaaccagcacattcgtagtcgtaatgggcaactgtgggatgggaccaactactttgggtgtccgtgtttccttttattcttataattttccttatggttacaagcttatggttataggtttgtaacc

SEQ ID NO: 496 - RNA, 587 nt, synthetic construct
  source 1..587: mol_type = other RNA
catggttacccacgaggtgcagtggtcttgtattacggtacatttccataccagttttataaaccctaccctgaaacttatagaagcttgtacacaccgaccgacaggtggcaatcatccagattgtcgaaggtcaagcacttctgtttccccggtatccttgtatacgcttcacccgaggcgaaaaccgaggttatcgttacccgcaaagtgcctacgagaagcctagtatcactttggaaacctatggttggtcgctcagctgttttcccaacagtagacctggcagatgaggctggacgctccccaccagcgatggtggtccagcctgcgtggctgcctgcacaccctgtggggtgtgaagccagaaagtggacaaggtgtgaagagcctattgtgctcactttgagtcctccggcccctgaatgtggctaatcctaaccccgtagctgttgcatgtaatccaacatgtatgcagtcgtaatgggcaactatgggatggaaccaactactttgggtgtccgtgtttcttgtttttctttatatactgcttatggtgacaatagtaattcattactcttgttacc

SEQ ID NO: 497 - RNA, 618 nt, synthetic construct
  source 1..618: mol_type = other RNA
ttaaaactggatacaggttgttcccacctgtatcacccaagtggtgtggtgctcttgtatttcggtacgtttgcacgccagtttgctaccccttcccttttacgtaacttagaagtttacacaaagaccaataggcggtggtaaatccataccactaacggtcaaatacttctgtttccccggcatgcgaggaataggctccaaaagggctgaagccactagtgtcgttatccgcattggtactacgcaaagcctagtattaccttgaaaatttcttggctggtcgctccaccagataccccactggtagacctggcagatgaggcaggacttaccccactggcgacagtggtcctgcctgcgtggctgcctgcacaccccttacggggtgtgaagcccagaaacagacaaggtgtgaagagccccgtgtgctactagtgagtcctccggcccctgaatgcggctaatcttaccccacagctgttgcacgcaaaccagcgtgtatgcagtcgtaatgagcaattgtgggatggaaccgactactttgggtgtccgtgtttctttttattcctattatttgcttatggtgacaatattgatattatcagtgttgtcatc

SEQ ID NO: 498 - RNA, 607 nt, synthetic construct
  source 1..607: mol_type = other RNA
ttaaaactgggtataggttgttcccacctgtaccacccacgtggtgtagtgctcctgtattccggtacacttgcacgccagtttgccctcccttcctgtaacgtagaagcaatgtaaacggaccaaaaggggacggcaaaccacgtcgttcaaggtcaagcacttctgtttccccggcatgcgaggaatagaccttctcaagggttgaagccacaagtgtcgttacccgcattggtactacacagagcctagtactgctctagaaacttattggttggtcgttcagccatttcccctggtagacctggcagatgaggcaagaagttccccactggtaacagtgttcttgcctgcgtggctgcctgcacaccctaacgggtgtgaagccaatgagtggacagggtgtgaagagccgcgtgtgctaccaatgagtcctccggcccctgaatgcggctaatccaaccccacagctatggcatgcaagccagcatgtgcgtagtcgtaatgagtaattgtgggacggaaccgactactttgggtgtccgtgtttcctttattctcttatgttttgcctatggtgacaatattaagtattaatattgctacc

SEQ ID NO: 499 - RNA, 455 nt, synthetic construct
  source 1..455: mol_type = other RNA
tgcacttctgtttccccggtactagggtgttaaacttccccagaggttgaagcccgatgtatcgttacccgcatggttactaagcagagcctagtagcatcttgctttgcatatgagctggtcgttcagtcagtaaaccccctgatagacctggcagatgaggctggaaataccccactggtaacagtgttccagcctgcgtggctgcctgcccctcttttgaggggaagcccatatgtagacaaggtgtgaagagccgcgtttgctaactatgagtcctccggcccctgaatgcggctaatccaaccccacagctactgcgcagaaaccactgcgtaggtagtcgtaatgagcaattgtgggacggaaccgactactttgggtgtccgtgtttcctgttttactttacattgctcatggacacaacatatataaaatcgtatatgttgttcacc

SEQ ID NO: 500 - RNA, 440 nt, synthetic construct
  source 1..440: mol_type = other RNA
cacttctgtttccccggatgtgtgaataggcttcacccgaggctgaaactgtagcattcgttatccgcatggctactacgcgactgctagtagcattctgtatgacatgtggggtttcgctcagcagagacccagtctgtagatcagggtaatgaggctacacaatccccactggcgacagtggtgtagcctgcgtggtgccctgcccgaggttcgtcctcgggaccctccatgttagacagggtgtgaagacactagtgtgctagtcatgagtcctccggcccctgaatgcggctaatcttaaacctgcagccatcgcatgcatgccagcatgtaggtggtcgtaatgagcaattgcgggatggaaccgactactttgggtgtccgtgtttccctttttacatttatgtgtctcttatggttacatcattggtgtaatc

SEQ ID NO: 501 - RNA, 611 nt, synthetic construct
  source 1..611: mol_type = other RNA
ttaaaactgggttgtggttgttcccaccacaatcacctacgtggtgttgtagtcttgcatttcggtgcatttctatgccagttttatctccccagcccccgtaacttagaagaaaagaacacagaccaataggaggtggtcacccagaccacttacggtcaagcacttctgtttccccggttgatctagatatgctttacccgaggcaaaaactaaatcaatcgttatccgcaaagtgcctacgggaagcctagtagcactctgaaagcctatggctggtcgctccattgcaaacccagcaatagacctggcagatgaggctagacgtaccccaccagcgatggtggtctagcctgcgtggctgcctgcacaccctcatcgggtgtgaagccagaaagtggacagggtgtgaagagcctactgtgctcactttgagtcctccggcccctgaatgtggctaatcctaaccctgcagctgttgcacacaagccagtgtgtatgcagtcgtaacgagcaattgcgggatggaaccaactactttgggtgtccgtgtttctctttattccttatgttgacctatggtgacaagtgtgcaattcacgtttgtcact

SEQ ID NO: 502 - RNA, 615 nt, synthetic construct
  source 1..615: mol_type = other RNA
ttaaaactgggcaggagttgttcccactcttgccacccacagggtgtggtgctcttgtattacggtacacttgcatgccagttttatctcccccctccccacaatgtaatttagaagccaatcacatgaccaataggaagtggtaagccataccacttaaggtcaagcacttctgtttccccggtatgcgtggaataggcctcttaaggggctgaagccacaattatcgttacccgcatgtgaactacgcgaaacctagtactaccttgaaagtacattgtctggtcgctcagccaatccccatggtagacctggcagatgaggcaagaggtaccccactggtaacagtgttcttgcctgcgtggctgcctgcacacccttaccgggtgtgaagccaatgtatagacagggtgagaagagtcgagtgtgcttcacatgagtcctccggcccctgaatgcggctaatccaaccccgcagctgtagtatgcaagccagcatatgtgcagtcgtaatgggtaactgcgggacggaaccgactactttgggtgtccgtgtttcctgtttttcctttattcatgcttatggtgacaatattgagaattaatattgtcact

SEQ ID NO: 503 - RNA, 449 nt, synthetic construct
  source 1..449: mol_type = other RNA
agctctgcagatatctccccggacgtgtgaataggccctaccagggctgaagctgtagcgttcgttatccgcatgcctactgcgcaaaggttagtaactaactagatacttagtggtgtttcgctcagcagtaccccactgtagatcagggtaatgaggctacgcatcccccactggcgacagtggcgtagcctgcgtggtgccctgcccaggtttatacctgggacaccactatttggacagggtgtgaaggccagcgtgcgctaggcatgagtcctccggcccctgaatgcggctaatcctaaccctgcagccattgcatgcaaaccagcatgttggtggtcgtaatgagcaattgcgggatggaaccgactactttgggtgtccgtgtttcttgtttttccattaattgtcttatggttacaagtttgtgcaacaaatttgtgacc

SEQ ID NO: 504 - RNA, 617 nt, synthetic construct
  source 1..617: mol_type = other RNA
ttaaaactgaatcatggttgttcccaccatgattgtctactggacgttgtactcttgtattccggtacacttgtacgccagttttataaccccttcccctttgcaacttagaagaaagtaaacactggccaataggaaatagcaaaccacgctatttacggtcaagcacttctgtttccccggtctgacgggatatgcttcacccgaggcagaaactcagatgatcgttatccgcaaagtgcctacgggaagcctagtagcactttggaagttgttgggctggtcgctcaattgctgaccccgagcaatagacttggcagatgaggctggacgtgccccaccagtgatggtggtccagcctgcgtggctgcctactcaccctaacagggtgagaagcctatcaatagacaaggtgtgaagagcctactgtgctcactttgattcctccggcccctgaatgtggctaatcctaaccccgtatctatcgcatgcacaccagcatgtaggtagtcgtaatgggcaactacgggacggaaccaactactttgggtgtccgtgtttccttgttcttttattacttgcgtatggtgacaattgtatgaaatacgattgacacc

SEQ ID NO: 505 - RNA, 386 nt, synthetic construct
  source 1..386: mol_type = other RNA
gacccgcactagtactacgcaaagcctagtaatatcttgaagctcttctggttggtcgttccactagtcaccccctagtagacctggcagatgaggcaggacactccccactggtgacagtggtcctgcctgcgtggctgcctgcacaccctccggggtgtgaagccaaaagaaggacaaggtgtgaagagccccgtgtgctactagtgagtcctccggcccctgaatgcggctaatcttaccccacagctattgcacacaatccagtgtgtatgtagtcgtaatgagtaattgtgggacggaaccgactactttgggtgtccgtgtttccttttattctcatgtttttgcttatggtgacaatactgacatatagtgttgttacc

SEQ ID NO: 506 - RNA, 625 nt, synthetic construct
  source 1..625: mol_type = other RNA
ttaaaactgggtaggggttgttcccacccctaccacccacgtggtgtagtgctcctgtattacggtacacttgcacgccagtttgcctccctacccccttcccattcacacccaaccctgcgtaacttagaagctatgcacaagaccaataggtggtaacaatccatgttactaaaggtcaagtacttctgtttccccggcatgcgtggaataaacagtgcaaacggttgaggccacaaatgtcgttacccgcgcatgaactacgcagagcctagtatccccctgaaagtccattggttggtcgctcagctaatccccatagtagacctggcagatgaggcaagacgcaccccactggcgacagtggtcttgcctgcgtggctgcctgcacacccttcggggtgtgaagccaattgatagacagggtgtgaagagccgagtgtgcttcatgtgagtcctccggcccctgaatgcggctaatccaaccccgcagctgtggcacacaatccagtgtgtatgcagtcgtaacgggcaactgcgggacggaaccgactactttgggtgtccgtgtttccttttattctttaatcaagtacttatggtgacaataataaatattgttacc

SEQ ID NO: 507 - RNA, 620 nt, synthetic construct
  source 1..620: mol_type = other RNA
ttaaaactgagtgtgggttgttccccacccacactgtctacgggacgttgtactcttgtattccggtacacttgtacgcccagtttgccaccctaaacaccccgtaacaatagaagtctacgcacacttagaccaatagggggtgttcatccagttcacccaaggtcaagcacttctgtttccccggcataggggtgttaggcttcgcccgaggccaaagctctgattgtcgttatccgcacaactactggacaaagcctagtagcaccctacgatgtagcatggttggttgttccgccagtatcccctggtaaacctggcagatggggctagaagttcctcactggcgacagtgttctagcccgcgtggctgcctgctcccttatgggagaagccattctactgacaaggtgtgaagagccccgtacgctagttgtgattcctccggcccctgaatgcggctaatccaaccctgcagccattacatggaagccaccatgtggatggtcgtaatgagtaattgcgggacggaaccgactactttgggtgtccgtgtttcttgtttttcttttactgacgtttatggtgacaatatatatataacgtatatattgttcatc

SEQ ID NO: 508 - RNA, 339 nt, synthetic construct
  source 1..339: mol_type = other RNA
ggttggtcgctccgttgcaaccccagcaacagacctggcagatgaggctgagcattccccaccagcgatggtggctcagcctgcgtggctgcctgcgcacccttcggggtgcgaagccagaaagtggacaaggtgtgaagagcctattgtgctcactttgagtcctccggcccctgaatgtggctaatcctaaccccgcagctactacacataagccaatgtgcaggtagtcgtaacgggtaactgtgggatggaaccaactactttgggtgtccgtgtttccttgttatccttttttaaatgcctatggtgacaattgtacagtatacacttgttacc

SEQ ID NO: 509 - RNA, 480 nt, synthetic construct
  source 1..480: mol_type = other RNA
gtggtaaatccataccactaatggtcaaacacttctgttcccccggcatgtgaggaataggctccaaaagggctaaagccactagtgtcgttatccgcattggtactacgcaaagcctagtatcactctggaagtctctcggttggtcgctccaccaggtaccccactggtagacctggcagatgaggcaggactcaccccactggcgacagtggtcctgcctgcgtggctgcctgcacacccctacggggtgtgaagcctagagatagacagggtgtgaagagccccgtgtgctaccaatgagtcctccggcccctgaatgcggctaatcttaccccacagctgttgcacgcaatccagcgtgtatgcagtcgtaatgagcaattgtgggatggaaccgactactttgggtgtccgtgtttccttttattcctattatttgcttatggtgacaatattgatagcatcagtgttgtcatc

SEQ ID NO: 510 - RNA, 609 nt, synthetic construct
  source 1..609: mol_type = other RNA
aactgggcttgggttgtgcccacccaagctgcccacgtggcgttgtgctcttgtattccggtacacttgcacgccagtttgcctcccctaccctgcaacgaatttagaagaatggacacaaatagaccaataggtggtgacaatccatgtcactaatggtcaagcacttctgtttccccggtgtgatgtggaataaactcccccagggttgaagccataagcatcgttacccgctacgtgcctacgcaaaacctagtagcattctggagtctacttggttggccgttcagccactaacccgtggtaggcctggcagatgaggctgggcgtaccccactggtaacagtggcccagcctgcgtggctgcctgcccctctttgaggggaagccaattaggtgacagggtgtgaagagtcccgtgtgctcacgtagagtcctccggcccctgaatgtggctaatcctaaccccgcagctattgcacacaatccagtgtgttagtagtcgtaatgggcaactgtgggatggaaccaactactttgggtgtccgtgtttcttgtttttcttttatacttgcttatggtgacaaatagtgcatactgtttgacacc

SEQ ID NO: 511 - RNA, 438 nt, synthetic construct
  source 1..438: mol_type = other RNA
ttccccggacgtgtgaataggctccaccaggggctgaagctgtagcgttcgttacccgcactgctactacgcaagggttagtatctaactgaaaacattgtggagtttcgctcagcagaaccccactgtagatcggggtaatggggctacacaacccccaccggcgacggtggtgtagcccgcgtggtgccccgcctgaggcttgtgcctcaggacgccacaatgttgacagggtgagaaggcctacgtgtgctagcagtgagtcctccggcctctgaatgcggctaatcctaaccccatagccatcacacacaatccagtgtgcaggtggtcgtaacgggtaactatgggatggaaccgactactttgagtgtccgtgtttcctattttacctttacatgtcttatggtcacaatatagtgtatacatattgtgatc

SEQ ID NO: 512 - RNA, 641 nt, synthetic construct
  source 1..641: mol_type = other RNA
ttaaaacagccgtgtggttgtacccaccaccggacacactgtgtgttgtgcactggaatctcggttcctttgcatgcctgttttaaaccccccttcccccactctttctatcattcttttcttcctaatgtaacttagacgttataccacagtccaataggacgtggccaatccaggccatgacggacaagcacttctgtctccccgggcgtgtgaataggcctcaacaaggctgaagctgtagcgctcgttatccgcatttgtactacgcgatggctagtatcatccttctcttggtcttggcgtttcgctcagcgtggtaaccccccacgtagatcagggcaatgaggctgcatatgccccaccggcgacggtgatgcagcctgcgtggtgccccgcctgggttaacccccaggacgccacaatcaagacagggtgagaagacctgagtgtgctacagatgagtcctccggcccctgaatgcggctaatcctaaccctgcagctatcgtatgcaaaccagcatattggtagtcgtaacgagcaattgcgggacggaaccgactactttgggtgtccgtgtttctctttttatttgaaatgttgcttatggttacaagttttggtattaaacttgtgacc

SEQ ID NO: 513 - RNA, 607 nt, synthetic construct
  source 1..607: mol_type = other RNA
ttaaaacagctgtgtggttgttcccaccaccaggcacactgtgcgttgtacactgggattccggtcactttgtacgcctgtttgctatcccccccaacttatgtaatttagaagatgtacacaacgcccattaggatgcggccaaaccaggtccgcttagggcaagcacttctgtttccccgggtgtgtgaatagactctaacagggttgaagctgtagcactcgttatccgcgcaactactacgcgaatgttagtagcatcctgtgttgcatttgggatttcgctccgcagaaaaccccatctgtagattagggcaatgaggctacacataccccactggcgacagtggtgtagcctgcgtggtgccctacccaggccttcttggcctgggattccacttacaagacagggtgtgaaggcactagtgtgctagttgtgagtcctccggcccctgaatgcggctaatcttaaccccgtagcccccgcaagtaaaccaacttgtaggtggtcgtaatgagtaattacgggatggaaccgactactttgggtgtccgtgtttccttttattctttatatttgcatcctatggttacaacataagtaatc

SEQ ID NO: 514 - RNA, 446 nt, synthetic construct
  source 1..446: mol_type = other RNA
gcacttctgtttccccggacgtgtgaataggcctcaccaaggctgaagctgtagcgttcgttatccgctcacctactgcgcaaagactagtaactaactagatacttagtggtgtttcgctcagcagtaccccactgtagatcggggcaatgaggctacgcatcccccactggcgacagtggcgtagcctgcgtggtgccctgcccaggcttcggtctgggacaccactatgttgacagggtgtgaagaccggcgtgcgctaggtgtgactcctccggcccctgaatgcggctaatcctaaccccgcagccaccgcatgcaacccagcatgtagatggtcgtaacgagtaattgtgggatggaaccgactactttgggtgtccgtgtttcctgtttttctttattgttgtcctatggttacaaatttgtgtatcagatttgtgacc

SEQ ID NO: 515 - RNA, 614 nt, synthetic construct
  source 1..614: mol_type = other RNA
ttaaaactgaaccatggttgttcccaccatggttacccacgtggtgcagtggacttgtattacggtacatttccataccagttttataacccctaccctgaaacttttagaagcatgtacacatacagaccaacaggtggcaatcagccagattgctaacggtcaagcacttctgtttccccggtaatcttgcatacgcttcacccgaggcgaaaagtgagattatcgttatccgcaaagtgcctacgagaagcccagtagcacattgaaagcctatggttggtcgctcagctgttcacccaacagtagacctggcagatgaggctagatattccccaccagcgatggtgatctagcctgcgtggctgcctgcacaccctatcgggtgtgaagccagaaagtggacaaggtgtgaagagcctattgtgctcactttgagtcctccggcccctgaatgtggctaatcctaaccccgtagctgttgcatgtaacccaacatgtctgcagtcgtaatgggcaactacgggatggaaccaactactttgggtgtccgtgtttcttgtttttctttatatttgcttatggtgacaattgtagatactacacttgttacc

SEQ ID NO: 516 - RNA, 720 nt, synthetic construct
  source 1..720: mol_type = other RNA
accctacttaggcaacccccaccccttctcttacgggagctagggccaaggatctattgtagtggtgttgtatccccttaccttatacccatccccacccaaacggactggtattacggtttagactgaataatggtttatgaattcaaacctgttactcattcaggggaaaaatgaagacatattctatggattggacctgttatgaccaagagttggcgtcttgcgcgctagccgtatggacagtttaatggttactctttggattatgatttcagggttggccgcccaggataaaaggcaattgtggcaagtgatgttagtcattggcagttgaaacctgcctagaacatcctaggtctacgctgtgcgggccgaagtaagtctaggaacaacagggagtatgctgttttttgctttcacccaacacgaccgtacacgaaagagctagaggcatctggaggcaaagggaaaagaatttcttagcccgaatgttcattagagtccttgacgaatgcgtcccctctgtcccgagggtgaggcgtatggcgcatgctcatggcattactccaaggtgtatctagaggggggggccccctctacttagtctagtgctacctgacagggccgcggctggtcgtttgtgtatggtataaccagtagtaatcccccatggattgctttaaaaccccctcccccctcaacaagacattctctaag

SEQ ID NO: 517 - RNA, 561 nt, synthetic construct
  source 1..561: mol_type = other RNA
ccgaccagtagtgtccgaaatgctagagtggacttcctcccttcccctctgggtatcttgcccagtttcctccccccaacctgacgtgccacaggctgtgaaaacaccccgcgaaagctgccaaaagtgggaattgtgggtccccccctttgccaaggagtcgagtctttctcccttaaggctagccccatcagtgaattctgttgggcaactagtgacgccactgcatgcctccgacctcggccgcggagtgctgccccccaagtcgtgcccctgaccacaagttgtgctgtctggcaaacattgtctgtgagaatgttccgctgtggctgccaagcctggtaacaggctgccccagtgtgcgtagttctcatccagacttcggtctggcaacttgctgttaagacacggcgtaaggggcgtgtgccaacgccctggaacgagtgtccactctaataccccgaggaatgctacgtaggtacccctggttcgccagggatctgagcgtaggctaattgtctaagggtattttcatttcccactctctctttcttgttcata

SEQ ID NO: 518 - RNA, 646 nt, synthetic construct
  source 1..646: mol_type = other RNA
ggaattaaacgggcacccactcacccccatccccccctgtaacttaaagtgtgtgctcgtgaccttgactcctgcgggcttcaccgacccgtccagtgaacaaactgctaggtgactccttccccccccctggcctggatggcccacatccaggtcttcttcccccagcccgacatgtcatgggctgtttggaatccccgcgaaagctgctaacgtggcaattgtgggtcccccttccaacaagacaccgagtctttctcccttaaggctagccccgtgtggtgaattccaccgggcaactagtggtgtcaatgcatgcctccgacctcggccgcggagtgctgccccccaagttgcgaaactgaccaagactgtgctgcctggcaagcatagtctgaggagatgttccgctgtggttgccaaacctggtaacaggtgccccagtgtgcgtagtctccttccggttcgtccggctgtcctttggtaaagacacaatgtaaggggcgtgtgccaacgccctggaaagagtgaacttctactgccctaggaatgccacgcaggtacccctggtttcccaccagggatctgagcgtgggctaattgtctaacgggtagtttcatttccctcctctcttttgttgacatc

SEQ ID NO: 519 - RNA, 1054 nt, synthetic construct
  source 1..1054: mol_type = other RNA
ttcggtacctgtttggaggaattaaacgggcaccctacccaagggttacatgggactccaactcccctttccccgtaactctaagtaatgtgctcgtaatcttgacccctccgggttgtgtcgccccgtgagtgaacaaatagttagacacgctcctcccttcccctgggtgggcacacgcccactcacatccaccccccagcacaacatgttcgtgctgtggttgatgcacctggaagccgcgaaagcttcggttagtagtggcaaccggttgacctacacaaccaaatgctcagagtctttctcccttaaggctagaccccctggtgaattccacggtggcaactagttgagcaaacatgtcccacaagtgcggccgcggagtgctgttccccaagccttgtgtgtcctcctgtgaagttgtgcctggcaagcatatctgagaagatgttccgctgcgtcgtgccaacctggcaacaggtgacccagtgtgcgtagtcttcttccgtcttacgacggacttcctctaggatgccctggtgtaaggtacatgtgccaacgccccatgcgtggtgttcttctaaggccctaggaatgcaccgcaggtacccctgtctcggcagggatctgagcggtggctaattgtctacgggccttttcatttcccattcttcttgactgtcatcatggccacatcacacggatctcgtttggtgtccaatgcttctcagcttctttcctcctatgatagactctacagaactgtcagggactggcgtgacactgatcaactgcgccagacccgaatgccctaccttcttcctgttgcccctggtgagtgcatttcctgctaccttgagcggaccgaacgggaccccatgtccatcacggacgatgggtacccctggacggtttgcccagactgcaagacccctcccaaacgcaaccccccccccccgaagagtttctgtatgactctgacgtccagtcttggttcgaagaagaccagactcctgtgactgacagagaacagaacatttttgaccaaatagcc

SEQ ID NO: 520 - RNA, 579 nt, synthetic construct
  source 1..579: mol_type = other RNA
gccaggtcgcatcgcctggttggtgaccaaactgctagatgctcctccctttccctcggggttggcgcaccgccatccctgcatcctccccccagcctgacatgctacaggctgtgcaagaaccccgcgaaagctgccaccgtggcaattgtgggtccccctcttgtcaaggcacagagtctttctcccttaaggctagacccctctgtgaattcagaggcggcaactagttgtgccactacatgcctcagacctcggtcgcggagtgctgttccccaaaccctgacactgccgcgtgagtatgctgcttggcaagcattgcctggatggtcgttccgctggggctgccaggtctggtaacagaccgctccagtgtgcgtagaccatctccagcttcggctggtgctcacaaggtaagactcggtgtaaggttcatgtgccaacaccctggaatgagtgaaaactctactgccctaggaatgctacgcaggtacccctgctcccttgggagccagggatctgagcgtaggctaattgtctgtcgggtagtttcatttcccaccctctagactgttcacc

SEQ ID NO: 521 - RNA, 808 nt, synthetic construct
  source 1..808: mol_type = other RNA
tttgaaaagggggtgggggggcttcggccccctcaccctcttttccggcggcgcatgttcgcgtcgtcgtaagtctggattcccaaggcccactcggttcaacttcggtttccggacaaatacaaagaacctcagtcctcttggtactttctcgcctgagtctacaaagcgagaaacctgcccctctaacgccagacgagcggcataaaactcgaacttctggcacgttccaccaccccttctcctatcccaacccccattgcgctctcaaggtcgcgcttttccgagactagctcggattcaaaaagttcctggcaccctttaccccttcaggcccttaaggtaggaactgaccttgtgctgtgatctcggtgcggaagtgctactgcgtagtgattgtaagatccttttgtggttctgccctggcaaggctacagagtgctgtgatccgctgcggatgccatcctggtaacaggacccccagtgtgcgcaacagtatgttcacggtcttccgtgttcaccacattcggaacactgctttcgtgaaacagtgtgtgtccaatccctgtgatcagtatcaaccacaccacctaggaatgctaggaaggtaccccggttcgccgggatctgatcctaggctaattgtctacggtggtgctcctttttattttccacttcaactcactggttacaactgcttgatttctgtgtttgctgcttttctctgctctcactgccattctcaagtgttcacactgtccaagctcctttggttgttcgcttccacttgccactgtcaactcttgtc

SEQ ID NO: 522 - RNA, 473 nt, synthetic construct
  source 1..473: mol_type = other RNA
ccatggtgtacatcggtttccgggcaaatacaagaaccccagttttcctggcaattccttgactgggttaaagaaataaggaaccagcccctctaacgccagacgagcggctttaaacttgaacttctggcacacttttctccactacccttttccccaaactcggactgactcactggattttgaccactccccctttgtctgaccactcttttggatctccctccaacatgccggtggtgcctggcggaaaaagcacaagttgtgtgagcaacacccccacaggtcccacggaacggtctgtgcccgcagatctagtacgtgcggatccctggttgcttccactgctcgcctgtgagtagagtaggtgctgggtgtgatgcgtcttcggacgcctcgggcatagcattgctcccccgagaatcaagccatcgagatttctctggcctctgaagtcacgcctggacgcgtag

SEQ ID NO: 523 - RNA, 576 nt, synthetic construct
  source 1..576: mol_type = other RNA
tttgaaaagggggtgggggggcctcggccccctcaccctcttttccggtggccacccgcccgggccaccgttactccactccactccttcgggactggtttggaggaacataacagggcttcccatccctgtttacccttactccactcacccttccccttgaccaaccctatccacaccccactgactgactcctttggatcttgacctcggaatgcctacttgacctcccacttgcctctcccttttcggattgccggtggtgcctggcggaaaaagcacaagtgtgttgttggctaccaaactcctacccgacaaaggtgcgtgtccgcgtgctgagtaatgggataggagatgccaataacaggctcgcccatgagtagagcatggactgcggtgcatgtgacttcggtcaccaggggcatagcattgctcacccctgaatcaagtcatcgagatttctctgacctctgaagtgcactgtggttgcgtggctgggaatccacgcttgaccatgtactgcttgatagagtcgcggctggccgactcatgggttaaagtcagttgacaagacac

SEQ ID NO: 524 - RNA, 471 nt, synthetic construct
  source 1..471: mol_type = other RNA
catccccaatatgttcggtgaggaatgctaccacgtaactattagtgaacccattgactgttctgccctggcaaggctatagagtacagtgttccgctgtggatgccgtcctggtaacaggatccccagtgtgtgtagctgtatgttcaacttcggttgttcacagtccttggtctagcttttagtgaaatggtgtgcgccatatccctacatttgggtgccacctctcaacccctaggaatgctaggaaggtaccccaccctccggtgggatctgatcctaggctaattgtctatggggttgtttccttttcttttcaccactcattactggctcacagattgtttgttgtgttccctgctctctctagctcccaacacggcacacagtctcagccacaccgcctttgcaaacgactaccagatttgtttctttgactcctctgattctcacatcttcactgaaccagac

SEQ ID NO: 525 - RNA, 646 nt, synthetic construct
  source 1..646: mol_type = other RNA
gaaagggggcccggcggggcaacacccgtcggtccctctttccgtccaagccgcggacgttaaactgtggcacggttgtgcctaggtgcaaccctgctactaatggcggtacccctgcccttagtatgcatgtttgtatgaatggaatctgtagtgatgccctgctttggggtctctaaaacacactacagtgatggctagagctcctctactccggctaccttagtagtgagcattggaagtatattgtgaacagggttccacgcccgataaaggctggtattcccgctcatggagtggacctaggtaactagggccatgagtgtgtgtgaatcagcacccgcaagggatagcagtatatggaaggtgctcgtgaaacggcaagtggagttagtagcagctctcagtctcaaggtcagcttctagacatgtgccgcaggtaccccgtaagggatctgagcggtagctaattagtccctggaggttggctgactttcttcctatttctcttttcactgcgaattgtgtggattggtattctttagagcttgggagttgtctcatattgaattcatatattttactctatactacactcaaacacggctctctggtcagttaagaaaatcatttatagaataataaa

SEQ ID NO: 526 - RNA, 626 nt, synthetic construct; identical to SEQ ID NO: 460
  source 1..626: mol_type = other RNA

SEQ ID NO: 527 - RNA, 1551 nt, synthetic construct
  source 1..1551: mol_type = other RNA
gggagaccctcgaccgtcgattgtccactggtcaacaatagatgacttacaactaatcggaaggtgcagagactcgacgggagctaccctaacgtcaagacgagggtaaagagagagtccaattctcaaagccaataggcagtagcgaaagctgcaagagaatgaaaatccgttgattaaaacagcctgtgggttgatcccacccacaggcccattgggcgctagcactctggtatcacggtacctttgtgcgcctgttttataccccctcccccaactgtaacttagaagtaacacacaccgatcaacagtcagcgtggcacaccagccacgttttgatcaagcacttctgttaccccggactgagtatcaatagactgctcacgcggttgaaggagaaagcgttcgttatccggccaactacttcgaaaaacctagtaacaccgtggaagttgcagagtgtttcgctcagcactaccccagtgtagatcaggtcgatgagtcaccgcattccccacgggcgaccgtggcggtggctgcgttggcggcctgcccatggggaaacccatgggacgctctaatacagacatggtgcgaagagtctattgagctagttggtagtcctccggcccctgaatgcggctaatcctaactgcggagcacacaccctcaagccagagggcagtgtgtcgtaacgggcaactctgcagcggaaccgactactttgggtgtccgtgtttcattttattcctatactggctgcttatggtgacaattgagagatcgttaccatatagctattggattggccatccggtgactaatagagctattatatatccctttgttgggtttataccacttagcttgaaagaggttaaaacattacaattcattgttaagttgaatacagcaaaatgtatagaatgcagctgctgtcttgcatcgccctgagcctggccctggtcacaaacagcgctcctacaagctctagcaccaagaaaacccagctgcagctcgagcacctgctgctggacctgcagatgatcctgaacggcattaacaactacaagaacccaaagctgaccagaatgctgacatttaagttctacatgcctaagaaggccacagagctgaagcacctgcaatgtctggaagaggaactgaagcccctggaagaggtgcttaatctggctcagagcaagaacttccacctgagacctcgggacctgatcagcgacatcaacgtgatcgtgctggaactgaaaggcagcgagacaaccttcatgtgcgagtacgccgatgagaccgccaccatcgtggagttcctgaatcggtggatcaccttctgccagtccatcatctccaccctgacctgataatagagacgctacggacttaaataattgagccttaaagaagaaattctttaagtggatgctctcaaactcagggaaacctaaatctagttatagacaaggcaatcctgagccaagccgaagtagtaattagtaagaccagtggacaatcgacggataacagcatatctag

SEQ ID NO: 528 - RNA, 1527 nt, synthetic construct
  source 1..1527: mol_type = other RNA
gggagaccctcgaccgtcgattgtccactggtcaacaatagatgacttacaactaatcggaaggtgcagagactcgacgggagctaccctaacgtcaagacgagggtaaagagagagtccaattctcaaagccaataggcagtagcgaaagctgcaagagaatgagaagtaacacacaccgatcaacagtcagcgtggcacaccagccacgttttgatcaagcacttctgttaccccggactgagtatcaatagactgctcacgcggttgaaggagaaagcgttcgttatccggccaactacttcgaaaaacctagtaacaccgtggaagttgcagagtgtttcgctcagcactaccccagtgtagatcaggtcgatgagtcaccgcattccccacgggcgaccgtggcggtggctgcgttggcggcctgcccatggggaaacccatgggacgctctaatacagacatggtgcgaagagtctattgagctagttggtagtcctccggcccctgaatgcggctaatcctaactgcggagcacacaccctcaagccagagggcagtgtgtcgtaacgggcaactctgcagcggaaccgactactttgggtgtccgtgtttcattttattcctatactggctgcttatggtgacaattgagagatcgttaccatatagctattggattggccatccggtgactaatagagctattatatatccctttgttgggtttataccacttagcttgaaagaggttaaaacattacaattcattgttaagttgaatacagcaaagccaccatgtatagaatgcagctgctgtcttgcatcgccctgagcctggccctggtcacaaacagcgctcctacaagctctagcaccaagaaaacccagctgcagctcgagcacctgctgctggacctgcagatgatcctgaacggcattaacaactacaagaacccaaagctgaccagaatgctgacatttaagttctacatgcctaagaaggccacagagctgaagcacctgcaatgtctggaagaggaactgaagcccctggaagaggtgcttaatctggctcagagcaagaacttccacctgagacctcgggacctgatcagcgacatcaacgtgatcgtgctggaactgaaaggcagcgagacaaccttcatgtgcgagtacgccgatgagaccgccaccatcgtggagttcctgaatcggtggatcaccttctgccagtccatcatctccaccctgacctgataattaaaacagcctgtgggttgatcccacccacaggcccattgggcgctagcactctggtatcacggtacctttgtgcgcctgttttataccccctcccccaactgtaacttaaataattgagccttaaagaagaaattctttaagtggatgctctcaaactcagggaaacctaaatctagttatagacaaggcaatcctgagccaagccgaagtagtaattagtaagaccagtggacaatcgacggataacagcatatctag

SEQ ID NO: 529 - RNA, 1527 nt, synthetic construct
  source 1..1527: mol_type = other RNA
gggagaccctcgaccgtcgattgtccactggtcaacaatagatgacttacaactaatcggaaggtgcagagactcgacgggagctaccctaacgtcaagacgagggtaaagagagagtccaattctcaaagccaataggcagtagcgaaagctgcaagagaatgaaaattacaacacaccgatcaacagtcagcgtggcacaccagccacgttttgatcaagcacttctgttaccccggactgagtatcaatagactgctcacgcggttgaaggagaaagcgttcgttatccggccaactacttcgaaaaacctagtaacaccgtggaagttgcagagtgtttcgctcagcactaccccagtgtagatcaggtcgatgagtcaccgcattccccacgggcgaccgtggcggtggctgcgttggcggcctgcccatggggaaacccatgggacgctctaatacagacatggtgcgaagagtctattgagctagttggtagtcctccggcccctgaatgcggctaatcctaactgcggagcacacaccctcaagccagagggcagtgtgtcgtaacgggcaactctgcagcggaaccgactactttgggtgtccgtgtttcattttattcctatactggctgcttatggtgacaattgagagatcgttaccatatagctattggattggccatccggtgactaatagagctattatatatccctttgttgggtttataccacttagcttgaaagaggttaaaacattacaattcattgttaagttgaatacagcaaagccaccatgtatagaatgcagctgctgtcttgcatcgccctgagcctggccctggtcacaaacagcgctcctacaagctctagcaccaagaaaacccagctgcagctcgagcacctgctgctggacctgcagatgatcctgaacggcattaacaactacaagaacccaaagctgaccagaatgctgacatttaagttctacatgcctaagaaggccacagagctgaagcacctgcaatgtctggaagaggaactgaagcccctggaagaggtgcttaatctggctcagagcaagaacttccacctgagacctcgggacctgatcagcgacatcaacgtgatcgtgctggaactgaaaggcagcgagacaaccttcatgtgcgagtacgccgatgagaccgccaccatcgtggagttcctgaatcggtggatcaccttctgccagtccatcatctccaccctgacctgataattaaaacagcctgtgggttgatcccacccacaggcccattgggcgctagcactctggtatcacggtacctttgtgcgcctgttttataccccctcccccaactgtaacttaaataattgagccttaaagaagaaattctttaagtggatgctctcaaactcagggaaacctaaatctagttatagacaaggcaatcctgagccaagccgaagtagtaattagtaagaccagtggacaatcgacggataacagcatatctag

SEQ ID NO: 530 - RNA, 1527 nt, synthetic construct
  source 1..1527: mol_type = other RNA
gggagaccctcgaccgtcgattgtccactggtcaacaatagatgacttacaactaatcggaaggtgcagagactcgacgggagctaccctaacgtcaagacgagggtaaagagagagtccaattctcaaagccaataggcagtagcgaaagctgcaagagaatgaaacctcgctcagagcaagaacttccacctgagacctcgggacctgatcagcgacatcaacgtgatcgtgctggaactgaaaggcagcgagacaaccttcatgtgcgagtacgccgatgagaccgccaccatcgtggagttcctgaatcggtggatcaccttctgccagtccatcatctccaccctgacctgataattaaaacagcctgtgggttgatcccacccacaggcccattgggcgctagcactctggtatcacggtacctttgtgcgcctgttttataccccctcccccaactgtaacttagaagtaacacacaccgatcaacagtcagcgtggcacaccagccacgttttgatcaagcacttctgttaccccggactgagtatcaatagactgctcacgcggttgaaggagaaagcgttcgttatccggccaactacttcgaaaaacctagtaacaccgtggaagttgcagagtgtttcgctcagcactaccccagtgtagatcaggtcgatgagtcaccgcattccccacgggcgaccgtggcggtggctgcgttggcggcctgcccatggggaaacccatgggacgctctaatacagacatggtgcgaagagtctattgagctagttggtagtcctccggcccctgaatgcggctaatcctaactgcggagcacacaccctcaagccagagggcagtgtgtcgtaacgggcaactctgcagcggaaccgactactttgggtgtccgtgtttcattttattcctatactggctgcttatggtgacaattgagagatcgttaccatatagctattggattggccatccggtgactaatagagctattatatatccctttgttgggtttataccacttagcttgaaagaggttaaaacattacaattcattgttaagttgaatacagcaaagccaccatgtatagaatgcagctgctgtcttgcatcgccctgagcctggccctggtcacaaacagcgctcctacaagctctagcaccaagaaaacccagctgcagctcgagcacctgctgctggacctgcagatgatcctgaacggcattaacaactacaagaacccaaagctgaccagaatgctgacatttaagttctacatgcctaagaaggccacagagctgaagcacctgcaatgtctggaagaggaactgaagcccctggaagaggtcttaaataattgagccttaaagaagaaattctttaagtggatgctctcaaactcagggaaacctaaatctagttatagacaaggcaatcctgagccaagccgaagtagtaattagtaagaccagtggacaatcgacggataacagcatatctag

SEQ ID NO: 531 - RNA, 1527 nt, synthetic construct
  source 1..1527: mol_type = other RNA
gggagaccctcgaccgtcgattgtccactggtcaacaatagatgacttacaactaatcggaaggtgcagagactcgacgggagctaccctaacgtcaagacgagggtaaagagagagtccaattctcaaagccaataggcagtagcgaaagctgcaagagaatgaatctctgacatcaacgtgatcgtgctggaactgaaaggcagcgagacaaccttcatgtgcgagtacgccgatgagaccgccaccatcgtggagttcctgaatcggtggatcaccttctgccagtccatcatctccaccctgacctgataattaaaacagcctgtgggttgatcccacccacaggcccattgggcgctagcactctggtatcacggtacctttgtgcgcctgttttataccccctcccccaactgtaacttagaagtaacacacaccgatcaacagtcagcgtggcacaccagccacgttttgatcaagcacttctgttaccccggactgagtatcaatagactgctcacgcggttgaaggagaaagcgttcgttatccggccaactacttcgaaaaacctagtaacaccgtggaagttgcagagtgtttcgctcagcactaccccagtgtagatcaggtcgatgagtcaccgcattccccacgggcgaccgtggcggtggctgcgttggcggcctgcccatggggaaacccatgggacgctctaatacagacatggtgcgaagagtctattgagctagttggtagtcctccggcccctgaatgcggctaatcctaactgcggagcacacaccctcaagccagagggcagtgtgtcgtaacgggcaactctgcagcggaaccgactactttgggtgtccgtgtttcattttattcctatactggctgcttatggtgacaattgagagatcgttaccatatagctattggattggccatccggtgactaatagagctattatatatccctttgttgggtttataccacttagcttgaaagaggttaaaacattacaattcattgttaagttgaatacagcaaagccaccatgtatagaatgcagctgctgtcttgcatcgccctgagcctggccctggtcacaaacagcgctcctacaagctctagcaccaagaaaacccagctgcagctcgagcacctgctgctggacctgcagatgatcctgaacggcattaacaactacaagaacccaaagctgaccagaatgctgacatttaagttctacatgcctaagaaggccacagagctgaagcacctgcaatgtctggaagaggaactgaagcccctggaagaggtgcttaatctggctcagagcaagaacttccacctgagacctagagacttaaataattgagccttaaagaagaaattctttaagtggatgctctcaaactcagggaaacctaaatctagttatagacaaggcaatcctgagccaagccgaagtagtaattagtaagaccagtggacaatcgacggataacagcatatctag

SEQ ID NO: 532 - RNA, 1942 nt, synthetic construct
  source 1..1942: mol_type = other RNA
gggagaccctcgaccgtcgattgtccactggtcccgtcgattgtccactggtcaacaatagatgacttacaactaatcggaaggtgcagagactcgacgggagctaccctaacgtcaagacgagggtaaagagagagtccaattctcaaagccaataggcagtagcgaaagctgcaagagaatgaaaacccccccattaaaacagcctgtgggttgatcccacccacaggcccattgggcgctagcactctggtatcacggtacctttgtgcgcctgttttataccccctcccccaactgtaacttagaagtaacacacaccgatcaacagtcagcgtggcacaccagccacgttttgatcaagcacttctgttaccccggactgagtatcaatagactgctcacgcggttgaaggagaaagcgttcgttatccggccaactacttcgaaaaacctagtaacaccgtggaagttgcagagtgtttcgctcagcactaccccagtgtagatcaggtcgatgagtcaccgcattccccacgggcgaccgtggcggtggctgcgttggcggcctgcccatggggaaacccatgggacgctctaatacagacatggtgcgaagagtctattgagctagttggtagtcctccggcccctgaatgcggctaatcctaactgcggagcacacaccctcaagccagagggcagtgtgtcgtaacgggcaactctgcagcggaaccgactactttgggtgtccgtgtttcattttattcctatactggctgcttatggtgacaattgagagatcgttaccatatagctattggattggccatccggtgactaatagagctattatatatccctttgttgggtttataccacttagcttgaaagaggttaaaacattacaattcattgttaagttgaatacagcaaagccaccatggccagcgagttcaagaagaagctcttctggagggcagtggtggccgagttcctggccacgaccctctttgtcttcatcagcatcggttctgccctgggcttcaaatacccggtggggaacaaccagacggcggtccaggacaacgtgaaggtgtcgctggccttcgggctgagcatcgccacgctggcgcagagtgtgggccacatcagcggcgcccacctcaacccggctgtcacactggggctgctgctcagctgccagatcagcatcttccgtgccctcatgtacatcatcgcccagtgcgtgggggccatcgtcgccaccgccatcctctcaggcatcacctcctccctgactgggaactcgcttggccgcaatgacctggctgatggtgtgaactcgggccagggcctgggcatcgagatcatcgggaccctccagctggtgctatgcgtgctggctactaccgaccggaggcgccgtgaccttggtggctcagccccccttgccatcggcctctctgtagcccttggacacctcctggctattgactacactggctgtgggattaaccctgctcggtcctttggctccgcggtgatcacacacaacttcagcaaccactggattttctgggtggggccattcatcgggggagccctggctgtactcatctacgacttcatcctggccccacgcagcagtgacctcacagaccgcgtgaaggtgtggaccagcggccaggtggaggagtatgacctggatgccgacgacatcaactccagggtggagatgaagcccaaatgataaagacggggggggcttaaataattgagccttaaagaagaaattctttaagtggatgctctcaaactcagggaaacctaaatctagttatagacaaggcaatcctgagccaagccgaagtagtaattagtaagaccagtggacaatcgacgggaccagtggacaatcgacggataacagcatatctag

SEQ ID NO: 533 - RNA, 1915 nt, synthetic construct
  source 1..1915: mol_type = other RNA
gggagaccctcgaccgtcgattgtccactggtcccgtcgattgtccactggtcaacaatagatgacttacaactaatcggaaggtgcagagactcgacgggagctaccctaacgtcaagacgagggtaaagagagagtccaattctcaaagccaataggcagtagcgaaagctgcaagagaatgaactggaaactcgcttggccgcaatgacctggctgatggtgtgaactcgggccagggcctgggcatcgagatcatcgggaccctccagctggtgctatgcgtgctggctactaccgaccggaggcgccgtgaccttggtggctcagccccccttgccatcggcctctctgtagcccttggacacctcctggctattgactacactggctgtgggattaaccctgctcggtcctttggctccgcggtgatcacacacaacttcagcaaccactggattttctgggtggggccattcatcgggggagccctggctgtactcatctacgacttcatcctggccccacgcagcagtgacctcacagaccgcgtgaaggtgtggaccagcggccaggtggaggagtatgacctggatgccgacgacatcaactccagggtggagatgaagcccaaatgataattaaaacagcctgtgggttgatcccacccacaggcccattgggcgctagcactctggtatcacggtacctttgtgcgcctgttttataccccctcccccaactgtaacttagaagtaacacacaccgatcaacagtcagcgtggcacaccagccacgttttgatcaagcacttctgttaccccggactgagtatcaatagactgctcacgcggttgaaggagaaagcgttcgttatccggccaactacttcgaaaaacctagtaacaccgtggaagttgcagagtgtttcgctcagcactaccccagtgtagatcaggtcgatgagtcaccgcattccccacgggcgaccgtggcggtggctgcgttggcggcctgcccatggggaaacccatgggacgctctaatacagacatggtgcgaagagtctattgagctagttggtagtcctccggcccctgaatgcggctaatcctaactgcggagcacacaccctcaagccagagggcagtgtgtcgtaacgggcaactctgcagcggaaccgactactttgggtgtccgtgtttcattttattcctatactggctgcttatggtgacaattgagagatcgttaccatatagctattggattggccatccggtgactaatagagctattatatatccctttgttgggtttataccacttagcttgaaagaggttaaaacattacaattcattgttaagttgaatacagcaaagccaccatggccagcgagttcaagaagaagctcttctggagggcagtggtggccgagttcctggccacgaccctctttgtcttcatcagcatcggttctgccctgggcttcaaatacccggtggggaacaaccagacggcggtccaggacaacgtgaaggtgtcgctggccttcgggctgagcatcgccacgctggcgcagagtgtgggccacatcagcggcgcccacctcaacccggctgtcacactggggctgctgctcagctgccagatcagcatcttccgtgccctcatgtacatcatcgcccagtgcgtgggggccatcgtcgccaccgccatcctctcaggcatcacctccagcttaaataattgagccttaaagaagaaattctttaagtggatgctctcaaactcagggaaacctaaatctagttatagacaaggcaatcctgagccaagccgaagtagtaattagtaagaccagtggacaatcgacgggaccagtggacaatcgacggataacagcatatctag

SEQ ID NO: 534 - RNA, 1881 nt, synthetic construct
  source 1..1881: mol_type = other RNA
gggagaccctcgaccgtcgattgtccactggtcaataagagaaagtgcaacgactattccgataggaagtagggtcaagtgactcgaaatggggattacccttctagggtagtgatatagtctgaacatatatggaaacatatagaaggataggagtaacgaacctattcgtaacataattgaaccagctccctgactgggaactcgcttggccgcaatgacctggctgatggtgtgaactcgggccagggcctgggcatcgagatcatcgggaccctccagctggtgctatgcgtgctggctactaccgaccggaggcgccgtgaccttggtggctcagccccccttgccatcggcctctctgtagcccttggacacctcctggctattgactacactggctgtgggattaaccctgctcggtcctttggctccgcggtgatcacacacaacttcagcaaccactggattttctgggtggggccattcatcgggggagccctggctgtactcatctacgacttcatcctggccccacgcagcagtgacctcacagaccgcgtgaaggtgtggaccagcggccaggtggaggagtatgacctggatgccgacgacatcaactccagggtggagatgaagcccaaatgataattaaaacagcctgtgggttgatcccacccacaggcccattgggcgctagcactctggtatcacggtacctttgtgcgcctgttttataccccctcccccaactgtaacttagaagtaacacacaccgatcaacagtcagcgtggcacaccagccacgttttgatcaagcacttctgttaccccggactgagtatcaatagactgctcacgcggttgaaggagaaagcgttcgttatccggccaactacttcgaaaaacctagtaacaccgtggaagttgcagagtgtttcgctcagcactaccccagtgtagatcaggtcgatgagtcaccgcattccccacgggcgaccgtggcggtggctgcgttggcggcctgcccatggggaaacccatgggacgctctaatacagacatggtgcgaagagtctattgagctagttggtagtcctccggcccctgaatgcggctaatcctaactgcggagcacacaccctcaagccagagggcagtgtgtcgtaacgggcaactctgcagcggaaccgactactttgggtgtccgtgtttcattttattcctatactggctgcttatggtgacaattgagagatcgttaccatatagctattggattggccatccggtgactaatagagctattatatatccctttgttgggtttataccacttagcttgaaagaggttaaaacattacaattcattgttaagttgaatacagcaaagccaccatggccagcgagttcaagaagaagctcttctggagggcagtggtggccgagttcctggccacgaccctctttgtcttcatcagcatcggttctgccctgggcttcaaatacccggtggggaacaaccagacggcggtccaggacaacgtgaaggtgtcgctggccttcgggctgagcatcgccacgctggcgcagagtgtgggccacatcagcggcgcccacctcaacccggctgtcacactggggctgctgctcagctgccagatcagcatcttccgtgccctcatgtacatcatcgcccagtgcgtgggggccatcgtcgccaccgccatcctctctggcataaataattgtgcctttatacagtaatgtatatcgaaaaatcctctaattcagggaacacctaaacaaactaagatgtaggcaatcctgagctaagctcttagtgaccagtggacaatcgacggataacagcatatctag

SEQ ID NO: 535 - RNA, 1915 nt, synthetic construct
  source 1..1915: mol_type = other RNA
gggagaccctcgaccgtcgattgtccactggtcccgtcgattgtccactggtcaacaatagatgacttacaactaatcggaaggtgcagagactcgacgggagctaccctaacgtcaagacgagggtaaagagagagtccaattctcaaagccaataggcagtagcgaaagctgcaagagaatgagaagtaacacacaccgatcaacagtcagcgtggcacaccagccacgttttgatcaagcacttctgttaccccggactgagtatcaatagactgctcacgcggttgaaggagaaagcgttcgttatccggccaactacttcgaaaaacctagtaacaccgtggaagttgcagagtgtttcgctcagcactaccccagtgtagatcaggtcgatgagtcaccgcattccccacgggcgaccgtggcggtggctgcgttggcggcctgcccatggggaaacccatgggacgctctaatacagacatggtgcgaagagtctattgagctagttggtagtcctccggcccctgaatgcggctaatcctaactgcggagcacacaccctcaagccagagggcagtgtgtcgtaacgggcaactctgcagcggaaccgactactttgggtgtccgtgtttcattttattcctatactggctgcttatggtgacaattgagagatcgttaccatatagctattggattggccatccggtgactaatagagctattatatatccctttgttgggtttataccacttagcttgaaagaggttaaaacattacaattcattgttaagttgaatacagcaaagccaccatggccagcgagttcaagaagaagctcttctggagggcagtggtggccgagttcctggccacgaccctctttgtcttcatcagcatcggttctgccctgggcttcaaatacccggtggggaacaaccagacggcggtccaggacaacgtgaaggtgtcgctggccttcgggctgagcatcgccacgctggcgcagagtgtgggccacatcagcggcgcccacctcaacccggctgtcacactggggctgctgctcagctgccagatcagcatcttccgtgccctcatgtacatcatcgcccagtgcgtgggggccatcgtcgccaccgccatcctctcaggcatcacctcctccctgactgggaactcgcttggccgcaatgacctggctgatggtgtgaactcgggccagggcctgggcatcgagatcatcgggaccctccagctggtgctatgcgtgctggctactaccgaccggaggcgccgtgaccttggtggctcagccccccttgccatcggcctctctgtagcccttggacacctcctggctattgactacactggctgtgggattaaccctgctcggtcctttggctccgcggtgatcacacacaacttcagcaaccactggattttctgggtggggccattcatcgggggagccctggctgtactcatctacgacttcatcctggccccacgcagcagtgacctcacagaccgcgtgaaggtgtggaccagcggccaggtggaggagtatgacctggatgccgacgacatcaactccagggtggagatgaagcccaaatgataattaaaacagcctgtgggttgatcccacccacaggcccattgggcgctagcactctggtatcacggtacctttgtgcgcctgttttataccccctcccccaactgtaacttaaataattgagccttaaagaagaaattctttaagtggatgctctcaaactcagggaaacctaaatctagttatagacaaggcaatcctgagccaagccgaagtagtaattagtaagaccagtggacaatcgacgggaccagtggacaatcgacggataacagcatatctag

SEQ ID NO: 536 - RNA, 1915 nt, synthetic construct
  source 1..1915: mol_type = other RNA
gggagaccctcgaccgtcgattgtccactggtcccgtcgattgtccactggtcaacaatagatgacttacaactaatcggaaggtgcagagactcgacgggagctaccctaacgtcaagacgagggtaaagagagagtccaattctcaaagccaataggcagtagcgaaagctgcaagagaatgaaaattacaacacaccgatcaacagtcagcgtggcacaccagccacgttttgatcaagcacttctgttaccccggactgagtatcaatagactgctcacgcggttgaaggagaaagcgttcgttatccggccaactacttcgaaaaacctagtaacaccgtggaagttgcagagtgtttcgctcagcactaccccagtgtagatcaggtcgatgagtcaccgcattccccacgggcgaccgtggcggtggctgcgttggcggcctgcccatggggaaacccatgggacgctctaatacagacatggtgcgaagagtctattgagctagttggtagtcctccggcccctgaatgcggctaatcctaactgcggagcacacaccctcaagccagagggcagtgtgtcgtaacgggcaactctgcagcggaaccgactactttgggtgtccgtgtttcattttattcctatactggctgcttatggtgacaattgagagatcgttaccatatagctattggattggccatccggtgactaatagagctattatatatccctttgttgggtttataccacttagcttgaaagaggttaaaacattacaattcattgttaagttgaatacagcaaagccaccatggccagcgagttcaagaagaagctcttctggagggcagtggtggccgagttcctggccacgaccctctttgtcttcatcagcatcggttctgccctgggcttcaaatacccggtggggaacaaccagacggcggtccaggacaacgtgaaggtgtcgctggccttcgggctgagcatcgccacgctggcgcagagtgtgggccacatcagcggcgcccacctcaacccggctgtcacactggggctgctgctcagctgccagatcagcatcttccgtgccctcatgtacatcatcgcccagtgcgtgggggccatcgtcgccaccgccatcctctcaggcatcacctcctccctgactgggaactcgcttggccgcaatgacctggctgatggtgtgaactcgggccagggcctgggcatcgagatcatcgggaccctccagctggtgctatgcgtgctggctactaccgaccggaggcgccgtgaccttggtggctcagccccccttgccatcggcctctctgtagcccttggacacctcctggctattgactacactggctgtgggattaaccctgctcggtcctttggctccgcggtgatcacacacaacttcagcaaccactggattttctgggtggggccattcatcgggggagccctggctgtactcatctacgacttcatcctggccccacgcagcagtgacctcacagaccgcgtgaaggtgtggaccagcggccaggtggaggagtatgacctggatgccgacgacatcaactccagggtggagatgaagcccaaatgataattaaaacagcctgtgggttgatcccacccacaggcccattgggcgctagcactctggtatcacggtacctttgtgcgcctgttttataccccctcccccaactgtaacttaaataattgagccttaaagaagaaattctttaagtggatgctctcaaactcagggaaacctaaatctagttatagacaaggcaatcctgagccaagccgaagtagtaattagtaagaccagtggacaatcgacgggaccagtggacaatcgacggataacagcatatctag

SEQ ID NO: 537 - RNA, 2114 nt, synthetic construct
  source 1..2114: mol_type = other RNA
gggagaccctcgaggacaccccctgacccggtctcagaaagcctgaaagcagaattagtcattagaagggtggttggcttggtcggcatagactttgagcagaaagaggttgaaaatgttgagcctgatttctcttaggcccctctgcagtgtctgttgtggaggccagatacgtaactgcttccgctttttttggtctcattcaaggtgagcaaatccccttcatgtttctcaccagacaatgcagctgatgaggttccagctttgcaaatgtagtcatccatgaggactgtcttcctgagatttcatcaggaacaatagatgacttacaactaatcggaaggtgcagagactcgacgggagctaccctaacgtcaagacgagggtaaagagagagtccaattctcaaagccaataggcagtagcgaaagctgcaagagaatgaaaacccccccattaaaacagcctgtgggttgatcccacccacaggcccattgggcgctagcactctggtatcacggtacctttgtgcgcctgttttataccccctcccccaactgtaacttagaagtaacacacaccgatcaacagtcagcgtggcacaccagccacgttttgatcaagcacttctgttaccccggactgagtatcaatagactgctcacgcggttgaaggagaaagcgttcgttatccggccaactacttcgaaaaacctagtaacaccgtggaagttgcagagtgtttcgctcagcactaccccagtgtagatcaggtcgatgagtcaccgcattccccacgggcgaccgtggcggtggctgcgttggcggcctgcccatggggaaacccatgggacgctctaatacagacatggtgcgaagagtctattgagctagttggtagtcctccggcccctgaatgcggctaatcctaactgcggagcacacaccctcaagccagagggcagtgtgtcgtaacgggcaactctgcagcggaaccgactactttgggtgtccgtgtttcattttattcctatactggctgcttatggtgacaattgagagatcgttaccatatagctattggattggccatccggtgactaatagagctattatatatccctttgttgggtttataccacttagcttgaaagaggttaaaacattacaattcattgttaagttgaatacagcaaagccaccatgtatagaatgcagctgctgtcttgcatcgccctgagcctggccctggtcacaaacagcgctcctacaagctctagcaccaagaaaacccagctgcagctcgagcacctgctgctggacctgcagatgatcctgaacggcattaacaactacaagaacccaaagctgaccagaatgctgacatttaagttctacatgcctaagaaggccacagagctgaagcacctgcaatgtctggaagaggaactgaagcccctggaagaggtgcttaatctggctcagagcaagaacttccacctgagacctcgggacctgatcagcgacatcaacgtgatcgtgctggaactgaaaggcagcgagacaaccttcatgtgcgagtacgccgatgagaccgccaccatcgtggagttcctgaatcggtggatcaccttctgccagtccatcatctccaccctgacctgataaagacggggggggcttaaataattgagccttaaagaagaaattctttaagtggatgctctcaaactcagggaaacctaaatctagttatagacaaggcaatcctgagccaagccgaagtagtaattagtaacctgatgaaatctcaggaagacagtcctcatggatgactacatttgcaaagctggaacctcatcagctgcattgtctggtgagaaacatgaaggggatttgctcaccttgaatgagaccaaaaaaagcggaagcagttacgtatctggcctccacaacagacactgcagaggggcctaagagaaatcaggctcaacattttcaacctctttctgctcaaagtctatgccgaccaagccaaccacccttctaatgactaattctgctttcaggctttctgagaccgggtcagggggtgtccataacagcatatctag

SEQ ID NO: 538 - RNA, 1714 nt, synthetic construct
  source 1..1714: mol_type = other RNA
gggagaccctcgaggacaccccctgacccggtctcagaaagcctgaaagcagaattagtcattagaagggtggttggcttggtcggcatagactttgagcagaaagaggttgaaacaatagatgacttacaactaatcggaaggtgcagagactcgacgggagctaccctaacgtcaagacgagggtaaagagagagtccaattctcaaagccaataggcagtagcgaaagctgcaagagaatgaaaacccccccattaaaacagcctgtgggttgatcccacccacaggcccattgggcgctagcactctggtatcacggtacctttgtgcgcctgttttataccccctcccccaactgtaacttagaagtaacacacaccgatcaacagtcagcgtggcacaccagccacgttttgatcaagcacttctgttaccccggactgagtatcaatagactgctcacgcggttgaaggagaaagcgttcgttatccggccaactacttcgaaaaacctagtaacaccgtggaagttgcagagtgtttcgctcagcactaccccagtgtagatcaggtcgatgagtcaccgcattccccacgggcgaccgtggcggtggctgcgttggcggcctgcccatggggaaacccatgggacgctctaatacagacatggtgcgaagagtctattgagctagttggtagtcctccggcccctgaatgcggctaatcctaactgcggagcacacaccctcaagccagagggcagtgtgtcgtaacgggcaactctgcagcggaaccgactactttgggtgtccgtgtttcattttattcctatactggctgcttatggtgacaattgagagatcgttaccatatagctattggattggccatccggtgactaatagagctattatatatccctttgttgggtttataccacttagcttgaaagaggttaaaacattacaattcattgttaagttgaatacagcaaagccaccatgtatagaatgcagctgctgtcttgcatcgccctgagcctggccctggtcacaaacagcgctcctacaagctctagcaccaagaaaacccagctgcagctcgagcacctgctgctggacctgcagatgatcctgaacggcattaacaactacaagaacccaaagctgaccagaatgctgacatttaagttctacatgcctaagaaggccacagagctgaagcacctgcaatgtctggaagaggaactgaagcccctggaagaggtgcttaatctggctcagagcaagaacttccacctgagacctcgggacctgatcagcgacatcaacgtgatcgtgctggaactgaaaggcagcgagacaaccttcatgtgcgagtacgccgatgagaccgccaccatcgtggagttcctgaatcggtggatcaccttctgccagtccatcatctccaccctgacctgataaagacggggggggcttaaataattgagccttaaagaagaaattctttaagtggatgctctcaaactcagggaaacctaaatctagttatagacaaggcaatcctgagccaagccgaagtagtaattagtaatcaacctctttctgctcaaagtctatgccgaccaagccaaccacccttctaatgactaattctgctttcaggctttctgagaccgggtcagggggtgtccataacagcatatctag

SEQ ID NO: 539 - RNA, 1973 nt, synthetic construct
  source 1..1973: mol_type = other RNA
gggagaccctcgaaaagaagacagtctcgctctatcgcccaggctggagtgtagaatgcagtgctgtgatcttggctcactgcaacctctacctcccaggctcaagcgattcttctgcctcagcctcccgagtagctaggattacaggcgcgcgccaccacacctagcttatttttgtattttcagtagagatggggtttcaccatgttgaccaggctggtctcaaactcctgagcttaagtgacgtgcccgcctcagcctcccaaagtgcttggattataggtgtgagccactgcacaacaatagatgacttacaactaatcggaaggtgcagagactcgacgggagctaccctaacgtcaagacgagggtaaagagagagtccaattctcaaagccaataggcagtagcgaaagctgcaagagaatgaaaacccccccattaaaacagcctgtgggttgatcccacccacaggcccattgggcgctagcactctggtatcacggtacctttgtgcgcctgttttataccccctcccccaactgtaacttagaagtaacacacaccgatcaacagtcagcgtggcacaccagccacgttttgatcaagcacttctgttaccccggactgagtatcaatagactgctcacgcggttgaaggagaaagcgttcgttatccggccaactacttcgaaaaacctagtaacaccgtggaagttgcagagtgtttcgctcagcactaccccagtgtagatcaggtcgatgagtcaccgcattccccacgggcgaccgtggcggtggctgcgttggcggcctgcccatggggaaacccatgggacgctctaatacagacatggtgcgaagagtctattgagctagttggtagtcctccggcccctgaatgcggctaatcctaactgcggagcacacaccctcaagccagagggcagtgtgtcgtaacgggcaactctgcagcggaaccgactactttgggtgtccgtgtttcattttattcctatactggctgcttatggtgacaattgagagatcgttaccatatagctattggattggccatccggtgactaatagagctattatatatccctttgttgggtttataccacttagcttgaaagaggttaaaacattacaattcattgttaagttgaatacagcaaagccaccatgtatagaatgcagctgctgtcttgcatcgccctgagcctggccctggtcacaaacagcgctcctacaagctctagcaccaagaaaacccagctgcagctcgagcacctgctgctggacctgcagatgatcctgaacggcattaacaactacaagaacccaaagctgaccagaatgctgacatttaagttctacatgcctaagaaggccacagagctgaagcacctgcaatgtctggaagaggaactgaagcccctggaagaggtgcttaatctggctcagagcaagaacttccacctgagacctcgggacctgatcagcgacatcaacgtgatcgtgctggaactgaaaggcagcgagacaaccttcatgtgcgagtacgccgatgagaccgccaccatcgtggagttcctgaatcggtggatcaccttctgccagtccatcatctccaccctgacctgataaagacggggggggcttaaataattgagccttaaagaagaaattctttaagtggatgctctcaaactcagggaaacctaaatctagttatagacaaggcaatcctgagccaagccgaagtagtaattagtaacatctctactgaaaaatacaaaaaattagccgggcgtagtggcatgagcctgtagtcccagctacttgggaggctgaggcaggagaatggcgtgaactcgggaggcagagcttgcagtgagccgagatcacaccactgcactccagcctgggcgacagagcgagactccgtctcataacagcatatctag

SEQ ID NO: 540 - RNA, 1808 nt, synthetic construct
  source 1..1808: mol_type = other RNA
gggagaccctcgaagagagtctcgctcttcgcccaggctggagtgagtggtgtgatctggctcactgcaactctcctcccgtcagcattctctgcctcagcctcccagtagctggatacaggccgccacacccgctatttttgtattttcagtagagatgaacaatagatgacttacaactaatcggaaggtgcagagactcgacgggagctaccctaacgtcaagacgagggtaaagagagagtccaattctcaaagccaataggcagtagcgaaagctgcaagagaatgaaaacccccccattaaaacagcctgtgggttgatcccacccacaggcccattgggcgctagcactctggtatcacggtacctttgtgcgcctgttttataccccctcccccaactgtaacttagaagtaacacacaccgatcaacagtcagcgtggcacaccagccacgttttgatcaagcacttctgttaccccggactgagtatcaatagactgctcacgcggttgaaggagaaagcgttcgttatccggccaactacttcgaaaaacctagtaacaccgtggaagttgcagagtgtttcgctcagcactaccccagtgtagatcaggtcgatgagtcaccgcattccccacgggcgaccgtggcggtggctgcgttggcggcctgcccatggggaaacccatgggacgctctaatacagacatggtgcgaagagtctattgagctagttggtagtcctccggcccctgaatgcggctaatcctaactgcggagcacacaccctcaagccagagggcagtgtgtcgtaacgggcaactctgcagcggaaccgactactttgggtgtccgtgtttcattttattcctatactggctgcttatggtgacaattgagagatcgttaccatatagctattggattggccatccggtgactaatagagctattatatatccctttgttgggtttataccacttagcttgaaagaggttaaaacattacaattcattgttaagttgaatacagcaaagccaccatgtatagaatgcagctgctgtcttgcatcgccctgagcctggccctggtcacaaacagcgctcctacaagctctagcaccaagaaaacccagctgcagctcgagcacctgctgctggacctgcagatgatcctgaacggcattaacaactacaagaacccaaagctgaccagaatgctgacatttaagttctacatgcctaagaaggccacagagctgaagcacctgcaatgtctggaagaggaactgaagcccctggaagaggtgcttaatctggctcagagcaagaacttccacctgagacctcgggacctgatcagcgacatcaacgtgatcgtgctggaactgaaaggcagcgagacaaccttcatgtgcgagtacgccgatgagaccgccaccatcgtggagttcctgaatcggtggatcaccttctgccagtccatcatctccaccctgacctgataaagacggggggggcttaaataattgagccttaaagaagaaattctttaagtggatgctctcaaactcagggaaacctaaatctagttatagacaaggcaatcctgagccaagccgaagtagtaattagtaacatctctactgaaaatacaaaaatagcgggtgtggcggcctgtatccagctactgggaggctgaggcagagaatgctgacgggaggagagttgcagtgagccagatcacaccactcactccagcctgggcgaagagcgagactctctataacagcatatctag

SEQ ID NO: 541 - RNA, 1614 nt, synthetic construct
  source 1..1614: mol_type = other RNA
gggagaccctcgaggcccctctgcagtgtctgttgtggaggccagatacgtaactgcttccgcaacaatagatgacttacaactaatcggaaggtgcagagactcgacgggagctaccctaacgtcaagacgagggtaaagagagagtccaattctcaaagccaataggcagtagcgaaagctgcaagagaatgaaaacccccccattaaaacagcctgtgggttgatcccacccacaggcccattgggcgctagcactctggtatcacggtacctttgtgcgcctgttttataccccctcccccaactgtaacttagaagtaacacacaccgatcaacagtcagcgtggcacaccagccacgttttgatcaagcacttctgttaccccggactgagtatcaatagactgctcacgcggttgaaggagaaagcgttcgttatccggccaactacttcgaaaaacctagtaacaccgtggaagttgcagagtgtttcgctcagcactaccccagtgtagatcaggtcgatgagtcaccgcattccccacgggcgaccgtggcggtggctgcgttggcggcctgcccatggggaaacccatgggacgctctaatacagacatggtgcgaagagtctattgagctagttggtagtcctccggcccctgaatgcggctaatcctaactgcggagcacacaccctcaagccagagggcagtgtgtcgtaacgggcaactctgcagcggaaccgactactttgggtgtccgtgtttcattttattcctatactggctgcttatggtgacaattgagagatcgttaccatatagctattggattggccatccggtgactaatagagctattatatatccctttgttgggtttataccacttagcttgaaagaggttaaaacattacaattcattgttaagttgaatacagcaaagccaccatgtatagaatgcagctgctgtcttgcatcgccctgagcctggccctggtcacaaacagcgctcctacaagctctagcaccaagaaaacccagctgcagctcgagcacctgctgctggacctgcagatgatcctgaacggcattaacaactacaagaacccaaagctgaccagaatgctgacatttaagttctacatgcctaagaaggccacagagctgaagcacctgcaatgtctggaagaggaactgaagcccctggaagaggtgcttaatctggctcagagcaagaacttccacctgagacctcgggacctgatcagcgacatcaacgtgatcgtgctggaactgaaaggcagcgagacaaccttcatgtgcgagtacgccgatgagaccgccaccatcgtggagttcctgaatcggtggatcaccttctgccagtccatcatctccaccctgacctgataaagacggggggggcttaaataattgagccttaaagaagaaattctttaagtggatgctctcaaactcagggaaacctaaatctagttatagacaaggcaatcctgagccaagccgaagtagtaattagtaagcggaagcagttacgtatctggcctccacaacagacactgcagaggggccataacagcatatctag

SEQ ID NO: 542 - RNA, 1614 nt, synthetic construct
  source 1..1614: mol_type = other RNA
gggagaccctcgatagactttgagcagaaagaggttgaaaatgttgagcctgatttctcttagaacaatagatgacttacaactaatcggaaggtgcagagactcgacgggagctaccctaacgtcaagacgagggtaaagagagagtccaattctcaaagccaataggcagtagcgaaagctgcaagagaatgaaaacccccccattaaaacagcctgtgggttgatcccacccacaggcccattgggcgctagcactctggtatcacggtacctttgtgcgcctgttttataccccctcccccaactgtaacttagaagtaacacacaccgatcaacagtcagcgtggcacaccagccacgttttgatcaagcacttctgttaccccggactgagtatcaatagactgctcacgcggttgaaggagaaagcgttcgttatccggccaactacttcgaaaaacctagtaacaccgtggaagttgcagagtgtttcgctcagcactaccccagtgtagatcaggtcgatgagtcaccgcattccccacgggcgaccgtggcggtggctgcgttggcggcctgcccatggggaaacccatgggacgctctaatacagacatggtgcgaagagtctattgagctagttggtagtcctccggcccctgaatgcggctaatcctaactgcggagcacacaccctcaagccagagggcagtgtgtcgtaacgggcaactctgcagcggaaccgactactttgggtgtccgtgtttcattttattcctatactggctgcttatggtgacaattgagagatcgttaccatatagctattggattggccatccggtgactaatagagctattatatatccctttgttgggtttataccacttagcttgaaagaggttaaaacattacaattcattgttaagttgaatacagcaaagccaccatgtatagaatgcagctgctgtcttgcatcgccctgagcctggccctggtcacaaacagcgctcctacaagctctagcaccaagaaaacccagctgcagctcgagcacctgctgctggacctgcagatgatcctgaacggcattaacaactacaagaacccaaagctgaccagaatgctgacatttaagttctacatgcctaagaaggccacagagctgaagcacctgcaatgtctggaagaggaactgaagcccctggaagaggtgcttaatctggctcagagcaagaacttccacctgagacctcgggacctgatcagcgacatcaacgtgatcgtgctggaactgaaaggcagcgagacaaccttcatgtgcgagtacgccgatgagaccgccaccatcgtggagttcctgaatcggtggatcaccttctgccagtccatcatctccaccctgacctgataaagacggggggggcttaaataattgagccttaaagaagaaattctttaagtggatgctctcaaactcagggaaacctaaatctagttatagacaaggcaatcctgagccaagccgaagtagtaattagtaactaagagaaatcaggctcaacattttcaacctctttctgctcaaagtctaataacagcatatctag

SEQ ID NO: 543 - RNA, 1236 nt, synthetic construct
  source 1..1236: mol_type = other RNA
aaaatccgttgattaaaacagcctgtgggttgatcccacccacaggcccattgggcgctagcactctggtatcacggtacctttgtgcgcctgttttataccccctcccccaactgtaacttagaagtaacacacaccgatcaacagtcagcgtggcacaccagccacgttttgatcaagcacttctgttaccccggactgagtatcaatagactgctcacgcggttgaaggagaaagcgttcgttatccggccaactacttcgaaaaacctagtaacaccgtggaagttgcagagtgtttcgctcagcactaccccagtgtagatcaggtcgatgagtcaccgcattccccacgggcgaccgtggcggtggctgcgttggcggcctgcccatggggaaacccatgggacgctctaatacagacatggtgcgaagagtctattgagctagttggtagtcctccggcccctgaatgcggctaatcctaactgcggagcacacaccctcaagccagagggcagtgtgtcgtaacgggcaactctgcagcggaaccgactactttgggtgtccgtgtttcattttattcctatactggctgcttatggtgacaattgagagatcgttaccatatagctattggattggccatccggtgactaatagagctattatatatccctttgttgggtttataccacttagcttgaaagaggttaaaacattacaattcattgttaagttgaatacagcaaaatgtatagaatgcagctgctgtcttgcatcgccctgagcctggccctggtcacaaacagcgctcctacaagctctagcaccaagaaaacccagctgcagctcgagcacctgctgctggacctgcagatgatcctgaacggcattaacaactacaagaacccaaagctgaccagaatgctgacatttaagttctacatgcctaagaaggccacagagctgaagcacctgcaatgtctggaagaggaactgaagcccctggaagaggtgcttaatctggctcagagcaagaacttccacctgagacctcgggacctgatcagcgacatcaacgtgatcgtgctggaactgaaaggcagcgagacaaccttcatgtgcgagtacgccgatgagaccgccaccatcgtggagttcctgaatcggtggatcaccttctgccagtccatcatctccaccctgacctgataatagagacgctacggactt

SEQ ID NO: 544 - RNA, 1212 nt, synthetic construct
  source 1..1212: mol_type = other RNA
agaagtaacacacaccgatcaacagtcagcgtggcacaccagccacgttttgatcaagcacttctgttaccccggactgagtatcaatagactgctcacgcggttgaaggagaaagcgttcgttatccggccaactacttcgaaaaacctagtaacaccgtggaagttgcagagtgtttcgctcagcactaccccagtgtagatcaggtcgatgagtcaccgcattccccacgggcgaccgtggcggtggctgcgttggcggcctgcccatggggaaacccatgggacgctctaatacagacatggtgcgaagagtctattgagctagttggtagtcctccggcccctgaatgcggctaatcctaactgcggagcacacaccctcaagccagagggcagtgtgtcgtaacgggcaactctgcagcggaaccgactactttgggtgtccgtgtttcattttattcctatactggctgcttatggtgacaattgagagatcgttaccatatagctattggattggccatccggtgactaatagagctattatatatccctttgttgggtttataccacttagcttgaaagaggttaaaacattacaattcattgttaagttgaatacagcaaagccaccatgtatagaatgcagctgctgtcttgcatcgccctgagcctggccctggtcacaaacagcgctcctacaagctctagcaccaagaaaacccagctgcagctcgagcacctgctgctggacctgcagatgatcctgaacggcattaacaactacaagaacccaaagctgaccagaatgctgacatttaagttctacatgcctaagaaggccacagagctgaagcacctgcaatgtctggaagaggaactgaagcccctggaagaggtgcttaatctggctcagagcaagaacttccacctgagacctcgggacctgatcagcgacatcaacgtgatcgtgctggaactgaaaggcagcgagacaaccttcatgtgcgagtacgccgatgagaccgccaccatcgtggagttcctgaatcggtggatcaccttctgccagtccatcatctccaccctgacctgataattaaaacagcctgtgggttgatcccacccacaggcccattgggcgctagcactctggtatcacggtacctttgtgcgcctgttttataccccctcccccaactgtaactt

SEQ ID NO: 545 - RNA, 1212 nt, synthetic construct
  source 1..1212: mol_type = other RNA
aaaattacaacacaccgatcaacagtcagcgtggcacaccagccacgttttgatcaagcacttctgttaccccggactgagtatcaatagactgctcacgcggttgaaggagaaagcgttcgttatccggccaactacttcgaaaaacctagtaacaccgtggaagttgcagagtgtttcgctcagcactaccccagtgtagatcaggtcgatgagtcaccgcattccccacgggcgaccgtggcggtggctgcgttggcggcctgcccatggggaaacccatgggacgctctaatacagacatggtgcgaagagtctattgagctagttggtagtcctccggcccctgaatgcggctaatcctaactgcggagcacacaccctcaagccagagggcagtgtgtcgtaacgggcaactctgcagcggaaccgactactttgggtgtccgtgtttcattttattcctatactggctgcttatggtgacaattgagagatcgttaccatatagctattggattggccatccggtgactaatagagctattatatatccctttgttgggtttataccacttagcttgaaagaggttaaaacattacaattcattgttaagttgaatacagcaaagccaccatgtatagaatgcagctgctgtcttgcatcgccctgagcctggccctggtcacaaacagcgctcctacaagctctagcaccaagaaaacccagctgcagctcgagcacctgctgctggacctgcagatgatcctgaacggcattaacaactacaagaacccaaagctgaccagaatgctgacatttaagttctacatgcctaagaaggccacagagctgaagcacctgcaatgtctggaagaggaactgaagcccctggaagaggtgcttaatctggctcagagcaagaacttccacctgagacctcgggacctgatcagcgacatcaacgtgatcgtgctggaactgaaaggcagcgagacaaccttcatgtgcgagtacgccgatgagaccgccaccatcgtggagttcctgaatcggtggatcaccttctgccagtccatcatctccaccctgacctgataattaaaacagcctgtgggttgatcccacccacaggcccattgggcgctagcactctggtatcacggtacctttgtgcgcctgttttataccccctcccccaactgtaactt

SEQ ID NO: 546 - RNA, 1212 nt, synthetic construct
  source 1..1212: mol_type = other RNA
aaacctcgctcagagcaagaacttccacctgagacctcgggacctgatcagcgacatcaacgtgatcgtgctggaactgaaaggcagcgagacaaccttcatgtgcgagtacgccgatgagaccgccaccatcgtggagttcctgaatcggtggatcaccttctgccagtccatcatctccaccctgacctgataattaaaacagcctgtgggttgatcccacccacaggcccattgggcgctagcactctggtatcacggtacctttgtgcgcctgttttataccccctcccccaactgtaacttagaagtaacacacaccgatcaacagtcagcgtggcacaccagccacgttttgatcaagcacttctgttaccccggactgagtatcaatagactgctcacgcggttgaaggagaaagcgttcgttatccggccaactacttcgaaaaacctagtaacaccgtggaagttgcagagtgtttcgctcagcactaccccagtgtagatcaggtcgatgagtcaccgcattccccacgggcgaccgtggcggtggctgcgttggcggcctgcccatggggaaacccatgggacgctctaatacagacatggtgcgaagagtctattgagctagttggtagtcctccggcccctgaatgcggctaatcctaactgcggagcacacaccctcaagccagagggcagtgtgtcgtaacgggcaactctgcagcggaaccgactactttgggtgtccgtgtttcattttattcctatactggctgcttatggtgacaattgagagatcgttaccatatagctattggattggccatccggtgactaatagagctattatatatccctttgttgggtttataccacttagcttgaaagaggttaaaacattacaattcattgttaagttgaatacagcaaagccaccatgtatagaatgcagctgctgtcttgcatcgccctgagcctggccctggtcacaaacagcgctcctacaagctctagcaccaagaaaacccagctgcagctcgagcacctgctgctggacctgcagatgatcctgaacggcattaacaactacaagaacccaaagctgaccagaatgctgacatttaagttctacatgcctaagaaggccacagagctgaagcacctgcaatgtctggaagaggaactgaagcccctggaagaggtctt

SEQ ID NO: 547 - RNA, 1212 nt, synthetic construct
  source 1..1212: mol_type = other RNA
aatctctgacatcaacgtgatcgtgctggaactgaaaggcagcgagacaaccttcatgtgcgagtacgccgatgagaccgccaccatcgtggagttcctgaatcggtggatcaccttctgccagtccatcatctccaccctgacctgataattaaaacagcctgtgggttgatcccacccacaggcccattgggcgctagcactctggtatcacggtacctttgtgcgcctgttttataccccctcccccaactgtaacttagaagtaacacacaccgatcaacagtcagcgtggcacaccagccacgttttgatcaagcacttctgttaccccggactgagtatcaatagactgctcacgcggttgaaggagaaagcgttcgttatccggccaactacttcgaaaaacctagtaacaccgtggaagttgcagagtgtttcgctcagcactaccccagtgtagatcaggtcgatgagtcaccgcattccccacgggcgaccgtggcggtggctgcgttggcggcctgcccatggggaaacccatgggacgctctaatacagacatggtgcgaagagtctattgagctagttggtagtcctccggcccctgaatgcggctaatcctaactgcggagcacacaccctcaagccagagggcagtgtgtcgtaacgggcaactctgcagcggaaccgactactttgggtgtccgtgtttcattttattcctatactggctgcttatggtgacaattgagagatcgttaccatatagctattggattggccatccggtgactaatagagctattatatatccctttgttgggtttataccacttagcttgaaagaggttaaaacattacaattcattgttaagttgaatacagcaaagccaccatgtatagaatgcagctgctgtcttgcatcgccctgagcctggccctggtcacaaacagcgctcctacaagctctagcaccaagaaaacccagctgcagctcgagcacctgctgctggacctgcagatgatcctgaacggcattaacaactacaagaacccaaagctgaccagaatgctgacatttaagttctacatgcctaagaaggccacagagctgaagcacctgcaatgtctggaagaggaactgaagcccctggaagaggtgcttaatctggctcagagcaagaacttccacctgagacctagagactt

SEQ ID NO: 548 - RNA, 1587 nt, synthetic construct
  source 1..1587: mol_type = other RNA
aaaacccccccattaaaacagcctgtgggttgatcccacccacaggcccattgggcgctagcactctggtatcacggtacctttgtgcgcctgttttataccccctcccccaactgtaacttagaagtaacacacaccgatcaacagtcagcgtggcacaccagccacgttttgatcaagcacttctgttaccccggactgagtatcaatagactgctcacgcggttgaaggagaaagcgttcgttatccggccaactacttcgaaaaacctagtaacaccgtggaagttgcagagtgtttcgctcagcactaccccagtgtagatcaggtcgatgagtcaccgcattccccacgggcgaccgtggcggtggctgcgttggcggcctgcccatggggaaacccatgggacgctctaatacagacatggtgcgaagagtctattgagctagttggtagtcctccggcccctgaatgcggctaatcctaactgcggagcacacaccctcaagccagagggcagtgtgtcgtaacgggcaactctgcagcggaaccgactactttgggtgtccgtgtttcattttattcctatactggctgcttatggtgacaattgagagatcgttaccatatagctattggattggccatccggtgactaatagagctattatatatccctttgttgggtttataccacttagcttgaaagaggttaaaacattacaattcattgttaagttgaatacagcaaagccaccatggccagcgagttcaagaagaagctcttctggagggcagtggtggccgagttcctggccacgaccctctttgtcttcatcagcatcggttctgccctgggcttcaaatacccggtggggaacaaccagacggcggtccaggacaacgtgaaggtgtcgctggccttcgggctgagcatcgccacgctggcgcagagtgtgggccacatcagcggcgcccacctcaacccggctgtcacactggggctgctgctcagctgccagatcagcatcttccgtgccctcatgtacatcatcgcccagtgcgtgggggccatcgtcgccaccgccatcctctcaggcatcacctcctccctgactgggaactcgcttggccgcaatgacctggctgatggtgtgaactcgggccagggcctgggcatcgagatcatcgggaccctccagctggtgctatgcgtgctggctactaccgaccggaggcgccgtgaccttggtggctcagccccccttgccatcggcctctctgtagcccttggacacctcctggctattgactacactggctgtgggattaaccctgctcggtcctttggctccgcggtgatcacacacaacttcagcaaccactggattttctgggtggggccattcatcgggggagccctggctgtactcatctacgacttcatcctggccccacgcagcagtgacctcacagaccgcgtgaaggtgtggaccagcggccaggtggaggagtatgacctggatgccgacgacatcaactccagggtggagatgaagcccaaatgataaagacggggggggctt

SEQ ID NO: 549 - RNA, 1560 nt, synthetic construct
  source 1..1560: mol_type = other RNA
aactggaaactcgcttggccgcaatgacctggctgatggtgtgaactcgggccagggcctgggcatcgagatcatcgggaccctccagctggtgctatgcgtgctggctactaccgaccggaggcgccgtgaccttggtggctcagccccccttgccatcggcctctctgtagcccttggacacctcctggctattgactacactggctgtgggattaaccctgctcggtcctttggctccgcggtgatcacacacaacttcagcaaccactggattttctgggtggggccattcatcgggggagccctggctgtactcatctacgacttcatcctggccccacgcagcagtgacctcacagaccgcgtgaaggtgtggaccagcggccaggtggaggagtatgacctggatgccgacgacatcaactccagggtggagatgaagcccaaatgataattaaaacagcctgtgggttgatcccacccacaggcccattgggcgctagcactctggtatcacggtacctttgtgcgcctgttttataccccctcccccaactgtaacttagaagtaacacacaccgatcaacagtcagcgtggcacaccagccacgttttgatcaagcacttctgttaccccggactgagtatcaatagactgctcacgcggttgaaggagaaagcgttcgttatccggccaactacttcgaaaaacctagtaacaccgtggaagttgcagagtgtttcgctcagcactaccccagtgtagatcaggtcgatgagtcaccgcattccccacgggcgaccgtggcggtggctgcgttggcggcctgcccatggggaaacccatgggacgctctaatacagacatggtgcgaagagtctattgagctagttggtagtcctccggcccctgaatgcggctaatcctaactgcggagcacacaccctcaagccagagggcagtgtgtcgtaacgggcaactctgcagcggaaccgactactttgggtgtccgtgtttcattttattcctatactggctgcttatggtgacaattgagagatcgttaccatatagctattggattggccatccggtgactaatagagctattatatatccctttgttgggtttataccacttagcttgaaagaggttaaaacattacaattcattgttaagttgaatacagcaaagccaccatggccagcgagttcaagaagaagctcttctggagggcagtggtggccgagttcctggccacgaccctctttgtcttcatcagcatcggttctgccctgggcttcaaatacccggtggggaacaaccagacggcggtccaggacaacgtgaaggtgtcgctggccttcgggctgagcatcgccacgctggcgcagagtgtgggccacatcagcggcgcccacctcaacccggctgtcacactggggctgctgctcagctgccagatcagcatcttccgtgccctcatgtacatcatcgcccagtgcgtgggggccatcgtcgccaccgccatcctctcaggcatcacctccagctt

SEQ ID NO: 550 - RNA, 1560 nt, synthetic construct
  source 1..1560: mol_type = other RNA
aaccagctccctgactgggaactcgcttggccgcaatgacctggctgatggtgtgaactcgggccagggcctgggcatcgagatcatcgggaccctccagctggtgctatgcgtgctggctactaccgaccggaggcgccgtgaccttggtggctcagccccccttgccatcggcctctctgtagcccttggacacctcctggctattgactacactggctgtgggattaaccctgctcggtcctttggctccgcggtgatcacacacaacttcagcaaccactggattttctgggtggggccattcatcgggggagccctggctgtactcatctacgacttcatcctggccccacgcagcagtgacctcacagaccgcgtgaaggtgtggaccagcggccaggtggaggagtatgacctggatgccgacgacatcaactccagggtggagatgaagcccaaatgataattaaaacagcctgtgggttgatcccacccacaggcccattgggcgctagcactctggtatcacggtacctttgtgcgcctgttttataccccctcccccaactgtaacttagaagtaacacacaccgatcaacagtcagcgtggcacaccagccacgttttgatcaagcacttctgttaccccggactgagtatcaatagactgctcacgcggttgaaggagaaagcgttcgttatccggccaactacttcgaaaaacctagtaacaccgtggaagttgcagagtgtttcgctcagcactaccccagtgtagatcaggtcgatgagtcaccgcattccccacgggcgaccgtggcggtggctgcgttggcggcctgcccatggggaaacccatgggacgctctaatacagacatggtgcgaagagtctattgagctagttggtagtcctccggcccctgaatgcggctaatcctaactgcggagcacacaccctcaagccagagggcagtgtgtcgtaacgggcaactctgcagcggaaccgactactttgggtgtccgtgtttcattttattcctatactggctgcttatggtgacaattgagagatcgttaccatatagctattggattggccatccggtgactaatagagctattatatatccctttgttgggtttataccacttagcttgaaagaggttaaaacattacaattcattgttaagttgaatacagcaaagccaccatggccagcgagttcaagaagaagctcttctggagggcagtggtggccgagttcctggccacgaccctctttgtcttcatcagcatcggttctgccctgggcttcaaatacccggtggggaacaaccagacggcggtccaggacaacgtgaaggtgtcgctggccttcgggctgagcatcgccacgctggcgcagagtgtgggccacatcagcggcgcccacctcaacccggctgtcacactggggctgctgctcagctgccagatcagcatcttccgtgccctcatgtacatcatcgcccagtgcgtgggggccatcgtcgccaccgccatcctctctggcat

SEQ ID NO: 551 - RNA, 1560 nt, synthetic construct
  source 1..1560: mol_type = other RNA
agaagtaacacacaccgatcaacagtcagcgtggcacaccagccacgttttgatcaagcacttctgttaccccggactgagtatcaatagactgctcacgcggttgaaggagaaagcgttcgttatccggccaactacttcgaaaaacctagtaacaccgtggaagttgcagagtgtttcgctcagcactaccccagtgtagatcaggtcgatgagtcaccgcattccccacgggcgaccgtggcggtggctgcgttggcggcctgcccatggggaaacccatgggacgctctaatacagacatggtgcgaagagtctattgagctagttggtagtcctccggcccctgaatgcggctaatcctaactgcggagcacacaccctcaagccagagggcagtgtgtcgtaacgggcaactctgcagcggaaccgactactttgggtgtccgtgtttcattttattcctatactggctgcttatggtgacaattgagagatcgttaccatatagctattggattggccatccggtgactaatagagctattatatatccctttgttgggtttataccacttagcttgaaagaggttaaaacattacaattcattgttaagttgaatacagcaaagccaccatggccagcgagttcaagaagaagctcttctggagggcagtggtggccgagttcctggccacgaccctctttgtcttcatcagcatcggttctgccctgggcttcaaatacccggtggggaacaaccagacggcggtccaggacaacgtgaaggtgtcgctggccttcgggctgagcatcgccacgctggcgcagagtgtgggccacatcagcggcgcccacctcaacccggctgtcacactggggctgctgctcagctgccagatcagcatcttccgtgccctcatgtacatcatcgcccagtgcgtgggggccatcgtcgccaccgccatcctctcaggcatcacctcctccctgactgggaactcgcttggccgcaatgacctggctgatggtgtgaactcgggccagggcctgggcatcgagatcatcgggaccctccagctggtgctatgcgtgctggctactaccgaccggaggcgccgtgaccttggtggctcagccccccttgccatcggcctctctgtagcccttggacacctcctggctattgactacactggctgtgggattaaccctgctcggtcctttggctccgcggtgatcacacacaacttcagcaaccactggattttctgggtggggccattcatcgggggagccctggctgtactcatctacgacttcatcctggccccacgcagcagtgacctcacagaccgcgtgaaggtgtggaccagcggccaggtggaggagtatgacctggatgccgacgacatcaactccagggtggagatgaagcccaaatgataattaaaacagcctgtgggttgatcccacccacaggcccattgggcgctagcactctggtatcacggtacctttgtgcgcctgttttataccccctcccccaactgtaactt

SEQ ID NO: 552 - RNA, 1560 nt, synthetic construct
  source 1..1560: mol_type = other RNA
aaaattacaacacaccgatcaacagtcagcgtggcacaccagccacgttttgatcaagcacttctgttaccccggactgagtatcaatagactgctcacgcggttgaaggagaaagcgttcgttatccggccaactacttcgaaaaacctagtaacaccgtggaagttgcagagtgtttcgctcagcactaccccagtgtagatcaggtcgatgagtcaccgcattccccacgggcgaccgtggcggtggctgcgttggcggcctgcccatggggaaacccatgggacgctctaatacagacatggtgcgaagagtctattgagctagttggtagtcctccggcccctgaatgcggctaatcctaactgcggagcacacaccctcaagccagagggcagtgtgtcgtaacgggcaactctgcagcggaaccgactactttgggtgtccgtgtttcattttattcctatactggctgcttatggtgacaattgagagatcgttaccatatagctattggattggccatccggtgactaatagagctattatatatccctttgttgggtttataccacttagcttgaaagaggttaaaacattacaattcattgttaagttgaatacagcaaagccaccatggccagcgagttcaagaagaagctcttctggagggcagtggtggccgagttcctggccacgaccctctttgtcttcatcagcatcggttctgccctgggcttcaaatacccggtggggaacaaccagacggcggtccaggacaacgtgaaggtgtcgctggccttcgggctgagcatcgccacgctggcgcagagtgtgggccacatcagcggcgcccacctcaacccggctgtcacactggggctgctgctcagctgccagatcagcatcttccgtgccctcatgtacatcatcgcccagtgcgtgggggccatcgtcgccaccgccatcctctcaggcatcacctcctccctgactgggaactcgcttggccgcaatgacctggctgatggtgtgaactcgggccagggcctgggcatcgagatcatcgggaccctccagctggtgctatgcgtgctggctactaccgaccggaggcgccgtgaccttggtggctcagccccccttgccatcggcctctctgtagcccttggacacctcctggctattgactacactggctgtgggattaaccctgctcggtcctttggctccgcggtgatcacacacaacttcagcaaccactggattttctgggtggggccattcatcgggggagccctggctgtactcatctacgacttcatcctggccccacgcagcagtgacctcacagaccgcgtgaaggtgtggaccagcggccaggtggaggagtatgacctggatgccgacgacatcaactccagggtggagatgaagcccaaatgataattaaaacagcctgtgggttgatcccacccacaggcccattgggcgctagcactctggtatcacggtacctttgtgcgcctgttttataccccctcccccaactgtaactt

SEQ ID NO: 553 - RNA, 1239 nt, synthetic construct
  source 1..1239: mol_type = other RNA
aaaacccccccattaaaacagcctgtgggttgatcccacccacaggcccattgggcgctagcactctggtatcacggtacctttgtgcgcctgttttataccccctcccccaactgtaacttagaagtaacacacaccgatcaacagtcagcgtggcacaccagccacgttttgatcaagcacttctgttaccccggactgagtatcaatagactgctcacgcggttgaaggagaaagcgttcgttatccggccaactacttcgaaaaacctagtaacaccgtggaagttgcagagtgtttcgctcagcactaccccagtgtagatcaggtcgatgagtcaccgcattccccacgggcgaccgtggcggtggctgcgttggcggcctgcccatggggaaacccatgggacgctctaatacagacatggtgcgaagagtctattgagctagttggtagtcctccggcccctgaatgcggctaatcctaactgcggagcacacaccctcaagccagagggcagtgtgtcgtaacgggcaactctgcagcggaaccgactactttgggtgtccgtgtttcattttattcctatactggctgcttatggtgacaattgagagatcgttaccatatagctattggattggccatccggtgactaatagagctattatatatccctttgttgggtttataccacttagcttgaaagaggttaaaacattacaattcattgttaagttgaatacagcaaagccaccatgtatagaatgcagctgctgtcttgcatcgccctgagcctggccctggtcacaaacagcgctcctacaagctctagcaccaagaaaacccagctgcagctcgagcacctgctgctggacctgcagatgatcctgaacggcattaacaactacaagaacccaaagctgaccagaatgctgacatttaagttctacatgcctaagaaggccacagagctgaagcacctgcaatgtctggaagaggaactgaagcccctggaagaggtgcttaatctggctcagagcaagaacttccacctgagacctcgggacctgatcagcgacatcaacgtgatcgtgctggaactgaaaggcagcgagacaaccttcatgtgcgagtacgccgatgagaccgccaccatcgtggagttcctgaatcggtggatcaccttctgccagtccatcatctccaccctgacctgataaagacggggggggctt

SEQ ID NO: 554 - RNA, 631 nt, synthetic construct
  source 1..631: mol_type = other RNA
agaagtaacacacaccgatcaacagtcagcgtggcacaccagccacgttttgatcaagcacttctgttaccccggactgagtatcaatagactgctcacgcggttgaaggagaaagcgttcgttatccggccaactacttcgaaaaacctagtaacaccgtggaagttgcagagtgtttcgctcagcactaccccagtgtagatcaggtcgatgagtcaccgcattccccacgggcgaccgtggcggtggctgcgttggcggcctgcccatggggaaacccatgggacgctctaatacagacatggtgcgaagagtctattgagctagttggtagtcctccggcccctgaatgcggctaatcctaactgcggagcacacaccctcaagccagagggcagtgtgtcgtaacgggcaactctgcagcggaaccgactactttgggtgtccgtgtttcattttattcctatactggctgcttatggtgacaattgagagatcgttaccatatagctattggattggccatccggtgactaatagagctattatatatccctttgttgggtttataccacttagcttgaaagaggttaaaacattacaattcattgttaagttgaatacagcaaa

SEQ ID NO: 555 - RNA, 110 nt, synthetic construct
  source 1..110: mol_type = other RNA
ttaaaacagcctgtgggttgatcccacccacaggcccattgggcgctagcactctggtatcacggtacctttgtgcgcctgttttataccccctcccccaactgtaactt

SEQ ID NO: 556 - RNA, 631 nt, synthetic construct
  source 1..631: mol_type = other RNA
aaaattacaacacaccgatcaacagtcagcgtggcacaccagccacgttttgatcaagcacttctgttaccccggactgagtatcaatagactgctcacgcggttgaaggagaaagcgttcgttatccggccaactacttcgaaaaacctagtaacaccgtggaagttgcagagtgtttcgctcagcactaccccagtgtagatcaggtcgatgagtcaccgcattccccacgggcgaccgtggcggtggctgcgttggcggcctgcccatggggaaacccatgggacgctctaatacagacatggtgcgaagagtctattgagctagttggtagtcctccggcccctgaatgcggctaatcctaactgcggagcacacaccctcaagccagagggcagtgtgtcgtaacgggcaactctgcagcggaaccgactactttgggtgtccgtgtttcattttattcctatactggctgcttatggtgacaattgagagatcgttaccatatagctattggattggccatccggtgactaatagagctattatatatccctttgttgggtttataccacttagcttgaaagaggttaaaacattacaattcattgttaagttgaatacagcaaa

SEQ ID NO: 557 - RNA, 190 nt, synthetic construct
  source 1..190: mol_type = other RNA
aaacctcgctcagagcaagaacttccacctgagacctcgggacctgatcagcgacatcaacgtgatcgtgctggaactgaaaggcagcgagacaaccttcatgtgcgagtacgccgatgagaccgccaccatcgtggagttcctgaatcggtggatcaccttctgccagtccatcatctccaccctgacc

SEQ ID NO: 558 - RNA, 269 nt, synthetic construct
  source 1..269: mol_type = other RNA
atgtatagaatgcagctgctgtcttgcatcgccctgagcctggccctggtcacaaacagcgctcctacaagctctagcaccaagaaaacccagctgcagctcgagcacctgctgctggacctgcagatgatcctgaacggcattaacaactacaagaacccaaagctgaccagaatgctgacatttaagttctacatgcctaagaaggccacagagctgaagcacctgcaatgtctggaagaggaactgaagcccctggaagaggtctt

SEQ ID NO: 559 - RNA, 145 nt, synthetic construct
  source 1..145: mol_type = other RNA
aatctctgacatcaacgtgatcgtgctggaactgaaaggcagcgagacaaccttcatgtgcgagtacgccgatgagaccgccaccatcgtggagttcctgaatcggtggatcaccttctgccagtccatcatctccaccctgacc

SEQ ID NO: 560 - RNA, 60 nt, synthetic construct
  source 1..60: mol_type = other RNA
atgtatagaatgcagctgctgtcttgcatcgccctgagcctggccctggtcacaaacagc

SEQ ID NO: 561 - RNA, 457 nt, synthetic construct
  source 1..457: mol_type = other RNA
aactggaaactcgcttggccgcaatgacctggctgatggtgtgaactcgggccagggcctgggcatcgagatcatcgggaccctccagctggtgctatgcgtgctggctactaccgaccggaggcgccgtgaccttggtggctcagccccccttgccatcggcctctctgtagcccttggacacctcctggctattgactacactggctgtgggattaaccctgctcggtcctttggctccgcggtgatcacacacaacttcagcaaccactggattttctgggtggggccattcatcgggggagccctggctgtactcatctacgacttcatcctggccccacgcagcagtgacctcacagaccgcgtgaaggtgtggaccagcggccaggtggaggagtatgacctggatgccgacgacatcaactccagggtggagatgaagcccaaatgataa

SEQ ID NO: 562 - RNA, 362 nt, synthetic construct
  source 1..362: mol_type = other RNA
gccaccatggccagcgagttcaagaagaagctcttctggagggcagtggtggccgagttcctggccacgaccctctttgtcttcatcagcatcggttctgccctgggcttcaaatacccggtggggaacaaccagacggcggtccaggacaacgtgaaggtgtcgctggccttcgggctgagcatcgccacgctggcgcagagtgtgggccacatcagcggcgcccacctcaacccggctgtcacactggggctgctgctcagctgccagatcagcatcttccgtgccctcatgtacatcatcgcccagtgcgtgggggccatcgtcgccaccgccatcctctcaggcatcacctccagctt

SEQ ID NO: 563 - RNA, 469 nt, synthetic construct
  source 1..469: mol_type = other RNA
aaccagctccctgactgggaactcgcttggccgcaatgacctggctgatggtgtgaactcgggccagggcctgggcatcgagatcatcgggaccctccagctggtgctatgcgtgctggctactaccgaccggaggcgccgtgaccttggtggctcagccccccttgccatcggcctctctgtagcccttggacacctcctggctattgactacactggctgtgggattaaccctgctcggtcctttggctccgcggtgatcacacacaacttcagcaaccactggattttctgggtggggccattcatcgggggagccctggctgtactcatctacgacttcatcctggccccacgcagcagtgacctcacagaccgcgtgaaggtgtggaccagcggccaggtggaggagtatgacctggatgccgacgacatcaactccagggtggagatgaagcccaaatgataa

SEQ ID NO: 564 - RNA, 350 nt, synthetic construct
  source 1..350: mol_type = other RNA
gccaccatggccagcgagttcaagaagaagctcttctggagggcagtggtggccgagttcctggccacgaccctctttgtcttcatcagcatcggttctgccctgggcttcaaatacccggtggggaacaaccagacggcggtccaggacaacgtgaaggtgtcgctggccttcgggctgagcatcgccacgctggcgcagagtgtgggccacatcagcggcgcccacctcaacccggctgtcacactggggctgctgctcagctgccagatcagcatcttccgtgccctcatgtacatcatcgcccagtgcgtgggggccatcgtcgccaccgccatcctctctggcat

SEQ ID NO: 565 - RNA, 678 nt, synthetic construct
  source 1..678: mol_type = other RNA
gggagaccctcgaccgtcgattgtccactggtcaacaatagatgacttacaactaatcggaaggtgcagagactcgacgggagctaccctaacgtcaagacgagggtaaagagagagtccaattctcaaagccaataggcagtagcgaaagctgcaagagaatgaaaatccgttgaccggcagccaactctgcacaaaatgtccatgatggggcatcgggtccgcattctcccatggtctacctttcgcttgaatcttagtgtgacaactccgtacaatgcagactttgacggggatgagatgaacttgcacctgccacagtctctggagacgcgagcagagatccaggagctggccatggttcctcgcatgattgtcaccccccagagcaatcggcctgtcatgggtattgtgcaggacacactcacagcagtgcgcaaattcaccaagagagacgtcttcctggagcgggtggaacggcacatgtgtgatggggacattgttatcttcaaagacgctacggacttaaataattgagccttaaagaagaaattctttaagtggatgctctcaaactcagggaaacctaaatctagttatagacaaggcaatcctgagccaagccgaagtagtaattagtaagaccagtggacaatcgacggataacagcatatctag

SEQ ID NO: 566 - RNA, 640 nt, synthetic construct
  source 1..640: mol_type = other RNA
gggagaccctcgaccgtcgattgtccactggtcaaccacgcaagggatggtgtcaaattcggcgaaacctaagcgcccgcccgggcgtatggcaacgccgagccaagcttcggcgcctgcgccgatgaaggtgtagagactagacggcacccacctaaggcaaacgctatggtgaaggcatagtccagggagtggcgaaagtcacacaaaccggaatccgttggtgctgccggcagccaactctgcacaaaatgtccatgatggggcatcgggtccgcattctcccatggtctacctttcgcttgaatcttagtgtgacaactccgtacaatgcagactttgacggggatgagatgaacttgcacctgccacagtctctggagacgcgagcagagatccaggagctggccatggttcctcgcatgattgtcaccccccagagcaatcggcctgtcatgggtattgtgcaggacacactcacagcagtgcgcaaattcaccaagagagacgtcttcctggagcgggtggaacggcacatgtgtgatggggacattgttatcttcaagagcagcggactcatatttcgatgtgccttgcgccgggagaccagtggacaatcgacggataacagcatatctag

SEQ ID NO: 567 - RNA, 640 nt, synthetic construct
  source 1..640: mol_type = other RNA
gggagaccctcgaccgtcgattgtccactggtcacgccgagccaagcttcggcgcctgcgccgatgaaggtgtagagactagacggcacccacctaaggcaaacgctatggtgaaggcatagtccagggagtggcgaaagtcacacaaaccggaatccgttggtgctgccggcagccaactctgcacaaaatgtccatgatggggcatcgggtccgcattctcccatggtctacctttcgcttgaatcttagtgtgacaactccgtacaatgcagactttgacggggatgagatgaacttgcacctgccacagtctctggagacgcgagcagagatccaggagctggccatggttcctcgcatgattgtcaccccccagagcaatcggcctgtcatgggtattgtgcaggacacactcacagcagtgcgcaaattcaccaagagagacgtcttcctggagcgggtggaacggcacatgtgtgatggggacattgttatcttcaagagcagcggactcatatttcgatgtgccttgcgccgggaaaccacgcaagggatggtgtcaaattcggcgaaacctaagcgcccgcccgggcgtatggcagaccagtggacaatcgacggataacagcatatctag

SEQ ID NO: 568 - RNA, 640 nt, synthetic construct
  source 1..640: mol_type = other RNA
gggagaccctcgaccgtcgattgtccactggtcccgggcgtatggcaacgccgagccaagcttcggcgcctgcgccgatgaaggtgtagagactagacggcacccacctaaggcaaacgctatggtgaaggcatagtccagggagtggcgaaagtcacacaaaccggaatccgttggtgctgccggcagccaactctgcacaaaatgtccatgatggggcatcgggtccgcattctcccatggtctacctttcgcttgaatcttagtgtgacaactccgtacaatgcagactttgacggggatgagatgaacttgcacctgccacagtctctggagacgcgagcagagatccaggagctggccatggttcctcgcatgattgtcaccccccagagcaatcggcctgtcatgggtattgtgcaggacacactcacagcagtgcgcaaattcaccaagagagacgtcttcctggagcgggtggaacggcacatgtgtgatggggacattgttatcttcaagagcagcggactcatatttcgatgtgccttgcgccgggaaaccacgcaagggatggtgtcaaattcggcgaaacctaagcgcccgcgaccagtggacaatcgacggataacagcatatctag

SEQ ID NO: 569 - RNA, 640 nt, synthetic construct
  source 1..640: mol_type = other RNA
gggagaccctcgaccgtcgattgtccactggtctgcgccgatgaaggtgtagagactagacggcacccacctaaggcaaacgctatggtgaaggcatagtccagggagtggcgaaagtcacacaaaccggaatccgttggtgctgccggcagccaactctgcacaaaatgtccatgatggggcatcgggtccgcattctcccatggtctacctttcgcttgaatcttagtgtgacaactccgtacaatgcagactttgacggggatgagatgaacttgcacctgccacagtctctggagacgcgagcagagatccaggagctggccatggttcctcgcatgattgtcaccccccagagcaatcggcctgtcatgggtattgtgcaggacacactcacagcagtgcgcaaattcaccaagagagacgtcttcctggagcgggtggaacggcacatgtgtgatggggacattgttatcttcaagagcagcggactcatatttcgatgtgccttgcgccgggaaaccacgcaagggatggtgtcaaattcggcgaaacctaagcgcccgcccgggcgtatggcaacgccgagccaagcttcggcgccgaccagtggacaatcgacggataacagcatatctag

SEQ ID NO: 570 - RNA, 640 nt, synthetic construct
  source 1..640: mol_type = other RNA
gggagaccctcgaccgtcgattgtccactggtcacgctatggtgaaggcatagtccagggagtggcgaaagtcacacaaaccggaatccgttggtgctgccggcagccaactctgcacaaaatgtccatgatggggcatcgggtccgcattctcccatggtctacctttcgcttgaatcttagtgtgacaactccgtacaatgcagactttgacggggatgagatgaacttgcacctgccacagtctctggagacgcgagcagagatccaggagctggccatggttcctcgcatgattgtcaccccccagagcaatcggcctgtcatgggtattgtgcaggacacactcacagcagtgcgcaaattcaccaagagagacgtcttcctggagcgggtggaacggcacatgtgtgatggggacattgttatcttcaagagcagcggactcatatttcgatgtgccttgcgccgggaaaccacgcaagggatggtgtcaaattcggcgaaacctaagcgcccgcccgggcgtatggcaacgccgagccaagcttcggcgcctgcgccgatgaaggtgtagagactagacggcacccacctaaggcaagaccagtggacaatcgacggataacagcatatctag

SEQ ID NO: 571 - RNA, 640 nt, synthetic construct
  source 1..640: mol_type = other RNA
gggagaccctcgaccgtcgattgtccactggtcaaaccggaatccgttggtgctgccggcagccaactctgcacaaaatgtccatgatggggcatcgggtccgcattctcccatggtctacctttcgcttgaatcttagtgtgacaactccgtacaatgcagactttgacggggatgagatgaacttgcacctgccacagtctctggagacgcgagcagagatccaggagctggccatggttcctcgcatgattgtcaccccccagagcaatcggcctgtcatgggtattgtgcaggacacactcacagcagtgcgcaaattcaccaagagagacgtcttcctggagcgggtggaacggcacatgtgtgatggggacattgttatcttcaagagcagcggactcatatttcgatgtgccttgcgccgggaaaccacgcaagggatggtgtcaaattcggcgaaacctaagcgcccgcccgggcgtatggcaacgccgagccaagcttcggcgcctgcgccgatgaaggtgtagagactagacggcacccacctaaggcaaacgctatggtgaaggcatagtccagggagtggcgaaagtcacacgaccagtggacaatcgacggataacagcatatctag

SEQ ID NO: 572 - RNA, 684 nt, synthetic construct
  source 1..684: mol_type = other RNA
gggagaccctcgaccgtcgattgtccactggtcaatgtatatcgaaaaatcctctaattcagggaacacctaaacaaactaagatgtaggcaatcctgagctaagctcttagtaataagagaaagtgcaacgactattccgataggaagtagggtcaagtgactcgaaatggggattacccttctagggtagtgatatagtctgaacatatatggaaacatatagaaggataggagtaacgaacctattcgtaacataattgaacttttagttatccggcagccaactctgcacaaaatgtccatgatggggcatcgggtccgcattctcccatggtctacctttcgcttgaatcttagtgtgacaactccgtacaatgcagactttgacggggatgagatgaacttgcacctgccacagtctctggagacgcgagcagagatccaggagctggccatggttcctcgcatgattgtcaccccccagagcaatcggcctgtcatgggtattgtgcaggacacactcacagcagtgcgcaaattcaccaagagagacgtcttcctggagcgggtggaacggcacatgtgtgatggggacattgttatcttcaaactactgaaagcataaataattgtgcctttatacagtgaccagtggacaatcgacggataacagcatatctag

SEQ ID NO: 573 - RNA, 684 nt, synthetic construct
  source 1..684: mol_type = other RNA
gggagaccctcgaccgtcgattgtccactggtcatcctgagctaagctcttagtaataagagaaagtgcaacgactattccgataggaagtagggtcaagtgactcgaaatggggattacccttctagggtagtgatatagtctgaacatatatggaaacatatagaaggataggagtaacgaacctattcgtaacataattgaacttttagttatccggcagccaactctgcacaaaatgtccatgatggggcatcgggtccgcattctcccatggtctacctttcgcttgaatcttagtgtgacaactccgtacaatgcagactttgacggggatgagatgaacttgcacctgccacagtctctggagacgcgagcagagatccaggagctggccatggttcctcgcatgattgtcaccccccagagcaatcggcctgtcatgggtattgtgcaggacacactcacagcagtgcgcaaattcaccaagagagacgtcttcctggagcgggtggaacggcacatgtgtgatggggacattgttatcttcaaactactgaaagcataaataattgtgcctttatacagtaatgtatatcgaaaaatcctctaattcagggaacacctaaacaaactaagatgtaggcagaccagtggacaatcgacggataacagcatatctag

SEQ ID NO: 574 - RNA, 684 nt, synthetic construct
  source 1..684: mol_type = other RNA
gggagaccctcgaccgtcgattgtccactggtcaagatgtaggcaatcctgagctaagctcttagtaataagagaaagtgcaacgactattccgataggaagtagggtcaagtgactcgaaatggggattacccttctagggtagtgatatagtctgaacatatatggaaacatatagaaggataggagtaacgaacctattcgtaacataattgaacttttagttatccggcagccaactctgcacaaaatgtccatgatggggcatcgggtccgcattctcccatggtctacctttcgcttgaatcttagtgtgacaactccgtacaatgcagactttgacggggatgagatgaacttgcacctgccacagtctctggagacgcgagcagagatccaggagctggccatggttcctcgcatgattgtcaccccccagagcaatcggcctgtcatgggtattgtgcaggacacactcacagcagtgcgcaaattcaccaagagagacgtcttcctggagcgggtggaacggcacatgtgtgatggggacattgttatcttcaaactactgaaagcataaataattgtgcctttatacagtaatgtatatcgaaaaatcctctaattcagggaacacctaaacaaactgaccagtggacaatcgacggataacagcatatctag

SEQ ID NO: 575 - RNA, 684 nt, synthetic construct
  source 1..684: mol_type = other RNA
gggagaccctcgaccgtcgattgtccactggtcaataagagaaagtgcaacgactattccgataggaagtagggtcaagtgactcgaaatggggattacccttctagggtagtgatatagtctgaacatatatggaaacatatagaaggataggagtaacgaacctattcgtaacataattgaacttttagttatccggcagccaactctgcacaaaatgtccatgatggggcatcgggtccgcattctcccatggtctacctttcgcttgaatcttagtgtgacaactccgtacaatgcagactttgacggggatgagatgaacttgcacctgccacagtctctggagacgcgagcagagatccaggagctggccatggttcctcgcatgattgtcaccccccagagcaatcggcctgtcatgggtattgtgcaggacacactcacagcagtgcgcaaattcaccaagagagacgtcttcctggagcgggtggaacggcacatgtgtgatggggacattgttatcttcaaactactgaaagcataaataattgtgcctttatacagtaatgtatatcgaaaaatcctctaattcagggaacacctaaacaaactaagatgtaggcaatcctgagctaagctcttagtgaccagtggacaatcgacggataacagcatatctag

SEQ ID NO: 576 - RNA, 684 nt, synthetic construct
  source 1..684: mol_type = other RNA
gggagaccctcgaccgtcgattgtccactggtctaggaagtagggtcaagtgactcgaaatggggattacccttctagggtagtgatatagtctgaacatatatggaaacatatagaaggataggagtaacgaacctattcgtaacataattgaacttttagttatccggcagccaactctgcacaaaatgtccatgatggggcatcgggtccgcattctcccatggtctacctttcgcttgaatcttagtgtgacaactccgtacaatgcagactttgacggggatgagatgaacttgcacctgccacagtctctggagacgcgagcagagatccaggagctggccatggttcctcgcatgattgtcaccccccagagcaatcggcctgtcatgggtattgtgcaggacacactcacagcagtgcgcaaattcaccaagagagacgtcttcctggagcgggtggaacggcacatgtgtgatggggacattgttatcttcaaactactgaaagcataaataattgtgcctttatacagtaatgtatatcgaaaaatcctctaattcagggaacacctaaacaaactaagatgtaggcaatcctgagctaagctcttagtaataagagaaagtgcaacgactattccgagaccagtggacaatcgacggataacagcatatctag

SEQ ID NO: 577 - RNA, 684 nt, synthetic construct
  source 1..684: mol_type = other RNA
gggagaccctcgaccgtcgattgtccactggtcctagggtagtgatatagtctgaacatatatggaaacatatagaaggataggagtaacgaacctattcgtaacataattgaacttttagttatccggcagccaactctgcacaaaatgtccatgatggggcatcgggtccgcattctcccatggtctacctttcgcttgaatcttagtgtgacaactccgtacaatgcagactttgacggggatgagatgaacttgcacctgccacagtctctggagacgcgagcagagatccaggagctggccatggttcctcgcatgattgtcaccccccagagcaatcggcctgtcatgggtattgtgcaggacacactcacagcagtgcgcaaattcaccaagagagacgtcttcctggagcgggtggaacggcacatgtgtgatggggacattgttatcttcaaactactgaaagcataaataattgtgcctttatacagtaatgtatatcgaaaaatcctctaattcagggaacacctaaacaaactaagatgtaggcaatcctgagctaagctcttagtaataagagaaagtgcaacgactattccgataggaagtagggtcaagtgactcgaaatggggattacccttgaccagtggacaatcgacggataacagcatatctag

SEQ ID NO: 578 - RNA, 684 nt, synthetic construct
  source 1..684: mol_type = other RNA
gggagaccctcgaccgtcgattgtccactggtcaacatatagaaggataggagtaacgaacctattcgtaacataattgaacttttagttatccggcagccaactctgcacaaaatgtccatgatggggcatcgggtccgcattctcccatggtctacctttcgcttgaatcttagtgtgacaactccgtacaatgcagactttgacggggatgagatgaacttgcacctgccacagtctctggagacgcgagcagagatccaggagctggccatggttcctcgcatgattgtcaccccccagagcaatcggcctgtcatgggtattgtgcaggacacactcacagcagtgcgcaaattcaccaagagagacgtcttcctggagcgggtggaacggcacatgtgtgatggggacattgttatcttcaaactactgaaagcataaataattgtgcctttatacagtaatgtatatcgaaaaatcctctaattcagggaacacctaaacaaactaagatgtaggcaatcctgagctaagctcttagtaataagagaaagtgcaacgactattccgataggaagtagggtcaagtgactcgaaatggggattacccttctagggtagtgatatagtctgaacatatatggagaccagtggacaatcgacggataacagcatatctag

SEQ ID NO: 579 - RNA, 684 nt, synthetic construct
  source 1..684: mol_type = other RNA
gggagaccctcgaccgtcgattgtccactggtctaacgaacctattcgtaacataattgaacttttagttatccggcagccaactctgcacaaaatgtccatgatggggcatcgggtccgcattctcccatggtctacctttcgcttgaatcttagtgtgacaactccgtacaatgcagactttgacggggatgagatgaacttgcacctgccacagtctctggagacgcgagcagagatccaggagctggccatggttcctcgcatgattgtcaccccccagagcaatcggcctgtcatgggtattgtgcaggacacactcacagcagtgcgcaaattcaccaagagagacgtcttcctggagcgggtggaacggcacatgtgtgatggggacattgttatcttcaaactactgaaagcataaataattgtgcctttatacagtaatgtatatcgaaaaatcctctaattcagggaacacctaaacaaactaagatgtaggcaatcctgagctaagctcttagtaataagagaaagtgcaacgactattccgataggaagtagggtcaagtgactcgaaatggggattacccttctagggtagtgatatagtctgaacatatatggaaacatatagaaggataggaggaccagtggacaatcgacggataacagcatatctag

SEQ ID NO: 580 - RNA, 809 nt, synthetic construct
  source 1..809: mol_type = other RNA
gggagaccctcgaccgtcgattgtccactggtcgcgcccgagtaccaggaccgtcgggcccccgagaagggggggcctaggatgcggcaagacgacccggttcggggaacgccagcgtgcgctggccgatcccgaggcgaggtgccgtagcgggcacccgtcgtaacgcgcggtagggcgtcggtcccccctcccacggcggaggggaggcttaaggtacgtgctaaacccccagcgatggggcctgtaggaaaagccctggtacggcgaagcctacggggaccgcccgatggcggtcggatgccggcgggccacggagcccccggcgtcgattgctgttaccggcagccaactctgcacaaaatgtccatgatggggcatcgggtccgcattctcccatggtctacctttcgcttgaatcttagtgtgacaactccgtacaatgcagactttgacggggatgagatgaacttgcacctgccacagtctctggagacgcgagcagagatccaggagctggccatggttcctcgcatgattgtcaccccccagagcaatcggcctgtcatgggtattgtgcaggacacactcacagcagtgcgcaaattcaccaagagagacgtcttcctggagcgggtggaacggcacatgtgtgatggggacattgttatcttcaataacaggttgacgacaacaggcctgtgacagcggggcttcgaactttccgtgtttttttttcttccgctagtcgatcatccgtgacggccgggcaagaccagtggacaatcgacggataacagcatatctag

SEQ ID NO: 581 - RNA, 809 nt, synthetic construct
  source 1..809: mol_type = other RNA
gggagaccctcgaccgtcgattgtccactggtcgcgctggccgatcccgaggcgaggtgccgtagcgggcacccgtcgtaacgcgcggtagggcgtcggtcccccctcccacggcggaggggaggcttaaggtacgtgctaaacccccagcgatggggcctgtaggaaaagccctggtacggcgaagcctacggggaccgcccgatggcggtcggatgccggcgggccacggagcccccggcgtcgattgctgttaccggcagccaactctgcacaaaatgtccatgatggggcatcgggtccgcattctcccatggtctacctttcgcttgaatcttagtgtgacaactccgtacaatgcagactttgacggggatgagatgaacttgcacctgccacagtctctggagacgcgagcagagatccaggagctggccatggttcctcgcatgattgtcaccccccagagcaatcggcctgtcatgggtattgtgcaggacacactcacagcagtgcgcaaattcaccaagagagacgtcttcctggagcgggtggaacggcacatgtgtgatggggacattgttatcttcaataacaggttgacgacaacaggcctgtgacagcggggcttcgaactttccgtgtttttttttcttccgctagtcgatcatccgtgacggccgggcaagcgcccgagtaccaggaccgtcgggcccccgagaagggggggcctaggatgcggcaagacgacccggttcggggaacgccagcgtgaccagtggacaatcgacggataacagcatatctag

SEQ ID NO: 582 - RNA, 809 nt, synthetic construct
  source 1..809: mol_type = other RNA
gggagaccctcgaccgtcgattgtccactggtcgcgggcacccgtcgtaacgcgcggtagggcgtcggtcccccctcccacggcggaggggaggcttaaggtacgtgctaaacccccagcgatggggcctgtaggaaaagccctggtacggcgaagcctacggggaccgcccgatggcggtcggatgccggcgggccacggagcccccggcgtcgattgctgttaccggcagccaactctgcacaaaatgtccatgatggggcatcgggtccgcattctcccatggtctacctttcgcttgaatcttagtgtgacaactccgtacaatgcagactttgacggggatgagatgaacttgcacctgccacagtctctggagacgcgagcagagatccaggagctggccatggttcctcgcatgattgtcaccccccagagcaatcggcctgtcatgggtattgtgcaggacacactcacagcagtgcgcaaattcaccaagagagacgtcttcctggagcgggtggaacggcacatgtgtgatggggacattgttatcttcaataacaggttgacgacaacaggcctgtgacagcggggcttcgaactttccgtgtttttttttcttccgctagtcgatcatccgtgacggccgggcaagcgcccgagtaccaggaccgtcgggcccccgagaagggggggcctaggatgcggcaagacgacccggttcggggaacgccagcgtgcgctggccgatcccgaggcgaggtgccgtagaccagtggacaatcgacggataacagcatatctag

SEQ ID NO: 583 - RNA, 809 nt, synthetic construct
  source 1..809: mol_type = other RNA
gggagaccctcgaccgtcgattgtccactggtcggcggaggggaggcttaaggtacgtgctaaacccccagcgatggggcctgtaggaaaagccctggtacggcgaagcctacggggaccgcccgatggcggtcggatgccggcgggccacggagcccccggcgtcgattgctgttaccggcagccaactctgcacaaaatgtccatgatggggcatcgggtccgcattctcccatggtctacctttcgcttgaatcttagtgtgacaactccgtacaatgcagactttgacggggatgagatgaacttgcacctgccacagtctctggagacgcgagcagagatccaggagctggccatggttcctcgcatgattgtcaccccccagagcaatcggcctgtcatgggtattgtgcaggacacactcacagcagtgcgcaaattcaccaagagagacgtcttcctggagcgggtggaacggcacatgtgtgatggggacattgttatcttcaataacaggttgacgacaacaggcctgtgacagcggggcttcgaactttccgtgtttttttttcttccgctagtcgatcatccgtgacggccgggcaagcgcccgagtaccaggaccgtcgggcccccgagaagggggggcctaggatgcggcaagacgacccggttcggggaacgccagcgtgcgctggccgatcccgaggcgaggtgccgtagcgggcacccgtcgtaacgcgcggtagggcgtcggtcccccctcccacgaccagtggacaatcgacggataacagcatatctag

SEQ ID NO: 584 - RNA, 809 nt, synthetic construct
  source 1..809: mol_type = other RNA
gggagaccctcgaccgtcgattgtccactggtcggagcccccggcgtcgattgctgttaccggcagccaactctgcacaaaatgtccatgatggggcatcgggtccgcattctcccatggtctacctttcgcttgaatcttagtgtgacaactccgtacaatgcagactttgacggggatgagatgaacttgcacctgccacagtctctggagacgcgagcagagatccaggagctggccatggttcctcgcatgattgtcaccccccagagcaatcggcctgtcatgggtattgtgcaggacacactcacagcagtgcgcaaattcaccaagagagacgtcttcctggagcgggtggaacggcacatgtgtgatggggacattgttatcttcaataacaggttgacgacaacaggcctgtgacagcggggcttcgaactttccgtgtttttttttcttccgctagtcgatcatccgtgacggccgggcaagcgcccgagtaccaggaccgtcgggcccccgagaagggggggcctaggatgcggcaagacgacccggttcggggaacgccagcgtgcgctggccgatcccgaggcgaggtgccgtagcgggcacccgtcgtaacgcgcggtagggcgtcggtcccccctcccacggcggaggggaggcttaaggtacgtgctaaacccccagcgatggggcctgtaggaaaagccctggtacggcgaagcctacggggaccgcccgatggcggtcggatgccggcgggccacgaccagtggacaatcgacggataacagcatatctag

SEQ ID NO: 585 - RNA, 662 nt, synthetic construct
  source 1..662: mol_type = other RNA
gggagaccctcgaccgtcgattgtccactggtcaatggagaaggtgtagagactggaaggcaggtaccctaacagtaaagctgagggtaaagggacagtccagaccacaaactggttaatccaggcagtgaaaactgtagatggtaagcataacccccggcagccaactctgcacaaaatgtccatgatggggcatcgggtccgcattctcccatggtctacctttcgcttgaatcttagtgtgacaactccgtacaatgcagactttgacggggatgagatgaacttgcacctgccacagtctctggagacgcgagcagagatccaggagctggccatggttcctcgcatgattgtcaccccccagagcaatcggcctgtcatgggtattgtgcaggacacactcacagcagtgcgcaaattcaccaagagagacgtcttcctggagcgggtggaacggcacatgtgtgatggggacattgttatcttcaagggctcaacgagtaagattgactaaacgcttaaaagttattcttactatgggcggtacgtaaagaaacttacgtatgtttacctgtcaaactcggggaagccaatagcgcggtaatcccgaaccaagctccagagaccagtggacaatcgacggataacagcatatctag

SEQ ID NO: 586 - RNA, 662 nt, synthetic construct
  source 1..662: mol_type = other RNA
gggagaccctcgaccgtcgattgtccactggtcaacttacgtatgtttacctgtcaaactcggggaagccaatagcgcggtaatcccgaaccaagctccagaaatggagaaggtgtagagactggaaggcaggtaccctaacagtaaagctgagggtaaagggacagtccagaccacaaactggttaatccaggcagtgaaaactgtagatggtaagcataacccccggcagccaactctgcacaaaatgtccatgatggggcatcgggtccgcattctcccatggtctacctttcgcttgaatcttagtgtgacaactccgtacaatgcagactttgacggggatgagatgaacttgcacctgccacagtctctggagacgcgagcagagatccaggagctggccatggttcctcgcatgattgtcaccccccagagcaatcggcctgtcatgggtattgtgcaggacacactcacagcagtgcgcaaattcaccaagagagacgtcttcctggagcgggtggaacggcacatgtgtgatggggacattgttatcttcaagggctcaacgagtaagattgactaaacgcttaaaagttattcttactatgggcggtacgtaaagagaccagtggacaatcgacggataacagcatatctag

SEQ ID NO: 587 - RNA, 662 nt, synthetic construct
  source 1..662: mol_type = other RNA
gggagaccctcgaccgtcgattgtccactggtcatcccgaaccaagctccagaaatggagaaggtgtagagactggaaggcaggtaccctaacagtaaagctgagggtaaagggacagtccagaccacaaactggttaatccaggcagtgaaaactgtagatggtaagcataacccccggcagccaactctgcacaaaatgtccatgatggggcatcgggtccgcattctcccatggtctacctttcgcttgaatcttagtgtgacaactccgtacaatgcagactttgacggggatgagatgaacttgcacctgccacagtctctggagacgcgagcagagatccaggagctggccatggttcctcgcatgattgtcaccccccagagcaatcggcctgtcatgggtattgtgcaggacacactcacagcagtgcgcaaattcaccaagagagacgtcttcctggagcgggtggaacggcacatgtgtgatggggacattgttatcttcaagggctcaacgagtaagattgactaaacgcttaaaagttattcttactatgggcggtacgtaaagaaacttacgtatgtttacctgtcaaactcggggaagccaatagcgcggtagaccagtggacaatcgacggataacagcatatctag

SEQ ID NO: 588 - RNA, 662 nt, synthetic construct
  source 1..662: mol_type = other RNA
gggagaccctcgaccgtcgattgtccactggtcaatccaggcagtgaaaactgtagatggtaagcataacccccggcagccaactctgcacaaaatgtccatgatggggcatcgggtccgcattctcccatggtctacctttcgcttgaatcttagtgtgacaactccgtacaatgcagactttgacggggatgagatgaacttgcacctgccacagtctctggagacgcgagcagagatccaggagctggccatggttcctcgcatgattgtcaccccccagagcaatcggcctgtcatgggtattgtgcaggacacactcacagcagtgcgcaaattcaccaagagagacgtcttcctggagcgggtggaacggcacatgtgtgatggggacattgttatcttcaagggctcaacgagtaagattgactaaacgcttaaaagttattcttactatgggcggtacgtaaagaaacttacgtatgtttacctgtcaaactcggggaagccaatagcgcggtaatcccgaaccaagctccagaaatggagaaggtgtagagactggaaggcaggtaccctaacagtaaagctgagggtaaagggacagtccagaccacaaactggttgaccagtggacaatcgacggataacagcatatctag

SEQ ID NO: 589 - RNA, 662 nt, synthetic construct
  source 1..662: mol_type = other RNA
gggagaccctcgaccgtcgattgtccactggtcaatccggtgaaggtgtagagactggatgggcagcacctaaaggccgcaaggtccacggtgaagggacagtccagaccacgaacgcccttatccgattgagatgggcggcggcgaaagccgaagcggtatgaatcctggggccggcagccaactctgcacaaaatgtccatgatggggcatcgggtccgcattctcccatggtctacctttcgcttgaatcttagtgtgacaactccgtacaatgcagactttgacggggatgagatgaacttgcacctgccacagtctctggagacgcgagcagagatccaggagctggccatggttcctcgcatgattgtcaccccccagagcaatcggcctgtcatgggtattgtgcaggacacactcacagcagtgcgcaaattcaccaagagagacgtcttcctggagcgggtggaacggcacatgtgtgatggggacattgttatcttcaacaggattcctaaggtaaattgggggttgcgcccggaaacgacgcaatcgatctgctcaaagtcggggaaagcttcgctggtcttccagtatgccaatcccgagccaagctccggagagaccagtggacaatcgacggataacagcatatctag

SEQ ID NO: 590 - RNA, 363 nt, synthetic construct
  source 1..363: mol_type = other RNA
aaaatccgttgaccggcagccaactctgcacaaaatgtccatgatggggcatcgggtccgcattctcccatggtctacctttcgcttgaatcttagtgtgacaactccgtacaatgcagactttgacggggatgagatgaacttgcacctgccacagtctctggagacgcgagcagagatccaggagctggccatggttcctcgcatgattgtcaccccccagagcaatcggcctgtcatgggtattgtgcaggacacactcacagcagtgcgcaaattcaccaagagagacgtcttcctggagcgggtggaacggcacatgtgtgatggggacattgttatcttcaaagacgctacggactt

SEQ ID NO: 591 - RNA, 366 nt, synthetic construct
  source 1..366: mol_type = other RNA
aatccgttggtgctgccggcagccaactctgcacaaaatgtccatgatggggcatcgggtccgcattctcccatggtctacctttcgcttgaatcttagtgtgacaactccgtacaatgcagactttgacggggatgagatgaacttgcacctgccacagtctctggagacgcgagcagagatccaggagctggccatggttcctcgcatgattgtcaccccccagagcaatcggcctgtcatgggtattgtgcaggacacactcacagcagtgcgcaaattcaccaagagagacgtcttcctggagcgggtggaacggcacatgtgtgatggggacattgttatcttcaagagcagcggactcat

SEQ ID NO: 592 - RNA, 363 nt, synthetic construct
  source 1..363: mol_type = other RNA
aacttttagttatccggcagccaactctgcacaaaatgtccatgatggggcatcgggtccgcattctcccatggtctacctttcgcttgaatcttagtgtgacaactccgtacaatgcagactttgacggggatgagatgaacttgcacctgccacagtctctggagacgcgagcagagatccaggagctggccatggttcctcgcatgattgtcaccccccagagcaatcggcctgtcatgggtattgtgcaggacacactcacagcagtgcgcaaattcaccaagagagacgtcttcctggagcgggtggaacggcacatgtgtgatggggacattgttatcttcaaactactgaaagcat

SEQ ID NO: 593 - RNA, 350 nt, synthetic construct
  source 1..350: mol_type = other RNA
ctgttaccggcagccaactctgcacaaaatgtccatgatggggcatcgggtccgcattctcccatggtctacctttcgcttgaatcttagtgtgacaactccgtacaatgcagactttgacggggatgagatgaacttgcacctgccacagtctctggagacgcgagcagagatccaggagctggccatggttcctcgcatgattgtcaccccccagagcaatcggcctgtcatgggtattgtgcaggacacactcacagcagtgcgcaaattcaccaagagagacgtcttcctggagcgggtggaacggcacatgtgtgatggggacattgttatcttcaataacaggt

SEQ ID NO: 594 - RNA, 349 nt, synthetic construct
  source 1..349: mol_type = other RNA
cataacccccggcagccaactctgcacaaaatgtccatgatggggcatcgggtccgcattctcccatggtctacctttcgcttgaatcttagtgtgacaactccgtacaatgcagactttgacggggatgagatgaacttgcacctgccacagtctctggagacgcgagcagagatccaggagctggccatggttcctcgcatgattgtcaccccccagagcaatcggcctgtcatgggtattgtgcaggacacactcacagcagtgcgcaaattcaccaagagagacgtcttcctggagcgggtggaacggcacatgtgtgatggggacattgttatcttcaagggct

SEQ ID NO: 595 - RNA, 356 nt, synthetic construct
  source 1..356: mol_type = other RNA
aatcctggggccggcagccaactctgcacaaaatgtccatgatggggcatcgggtccgcattctcccatggtctacctttcgcttgaatcttagtgtgacaactccgtacaatgcagactttgacggggatgagatgaacttgcacctgccacagtctctggagacgcgagcagagatccaggagctggccatggttcctcgcatgattgtcaccccccagagcaatcggcctgtcatgggtattgtgcaggacacactcacagcagtgcgcaaattcaccaagagagacgtcttcctggagcgggtggaacggcacatgtgtgatggggacattgttatcttcaacaggattcct

SEQ ID NO: 596 - RNA, 2740 nt, synthetic construct
  source 1..2740: mol_type = other RNA
gggagaccctcgaccgtcgattgtccactggtcaacaatagatgacttacaactaatcggaaggtgcagagactcgacgggagctaccctaacgtcaagacgagggtaaagagagagtccaattctcaaagccaataggcagtagcgaaagctgcaagagaatgaaaatccgttgattaaaacagcctgtgggttgcacccacccacagggcccactgggcgctagcactctggtatcacgatacctttgtgcgcctgttttatatccccaccccgagtaaacgttagaagttacgcaaccccgatcaatagtaggtgtagcactccagctgcatcgagatcaagcacttctgtctccccggaccgagtatcaatagactgctaacgcggttgaaggagaaaacgttcgttacccggccaattacttcgagaagcccagtagtgccgtgaaagttgcggagtgtttcgctcagcacttcccccgtgtagatcaggctgatgagtcaccgcgatccccacaggtgactgtggcggtggctgcgttggcggcctgcctatggggcaacccataggacgctctaatacagacatggtgcgaagagcctattgagctaattggtagtcctccggcccctgaatgcggctaatcctaactgcggagcacatgccctcaaaccagggggtggtgtgtcgtaacgggtaactctgcagcggaaccgactactttgggtgtccgtgtttctttttattcttataatggctgcttatggtgacaattaaagaattgttaccatatagctattggattggccatccggtgactaacaaatcgctcatataccagtttgttggttttgttcccttatcacatacagctcataacaccctcttatatttactacaattgaatagcaagaaatggaggacgccaagaacatcaagaagggcccggcgcccttctacccgctggaggacgggaccgccggcgagcagctccacaaggccatgaagcggtacgccctggtgccgggcacgatcgccttcaccgacgcccacatcgaggtcgacatcacctacgcggagtacttcgagatgagcgtgcgcctggccgaggccatgaagcggtacggcctgaacaccaaccaccggatcgtggtgtgctcggagaacagcctgcagttcttcatgccggtgctgggcgccctcttcatcggcgtggccgtcgccccggcgaacgacatctacaacgagcgggagctgctgaacagcatggggatcagccagccgaccgtggtgttcgtgagcaagaagggcctgcagaagatcctgaacgtgcagaagaagctgcccatcatccagaagatcatcatcatggacagcaagaccgactaccagggcttccagtcgatgtacacgttcgtgaccagccacctcccgccgggcttcaacgagtacgacttcgtcccggagagcttcgaccgggacaagaccatcgccctgatcatgaacagcagcggcagcaccggcctgccgaagggggtggccctgccgcaccggaccgcctgcgtgcgcttctcgcacgcccgggaccccatcttcggcaaccagatcatcccggacaccgccatcctgagcgtggtgccgttccaccacggcttcggcatgttcacgaccctgggctacctcatctgcggcttccgggtggtcctgatgtaccggttcgaggaggagctgttcctgcggagcctgcaggactacaagatccagagcgcgctgctcgtgccgaccctgttcagcttcttcgccaagagcaccctgatcgacaagtacgacctgtcgaacctgcacgagatcgccagcgggggcgccccgctgagcaaggaggtgggcgaggccgtggccaagcggttccacctcccgggcatccgccagggctacggcctgaccgagaccacgagcgcgatcctgatcacccccgagggggacgacaagccgggcgccgtgggcaaggtggtcccgttcttcgaggccaaggtggtggacctggacaccggcaagaccctgggcgtgaaccagcggggcgagctgtgcgtgcgggggccgatgatcatgagcggctacgtgaacaacccggaggccaccaacgccctcatcgacaaggacggctggctgcacagcggcgacatcgcctactgggacgaggacgagcacttcttcatcgtcgaccggctgaagtcgctgatcaagtacaagggctaccaggtggcgccggccgagctggagagcatcctgctccagcaccccaacatcttcgacgccggcgtggccgggctgccggacgacgacgccggcgagctgccggccgcggtggtggtgctggagcacggcaagaccatgacggagaaggagatcgtcgactacgtggccagccaggtgaccaccgccaagaagctgcggggcggcgtggtgttcgtggacgaggtcccgaagggcctgaccgggaagctcgacgcccggaagatccgcgagatcctgatcaaggccaagaagggcggcaagatcgccgtgagctaaagacgctacggacttaaataattgagccttaaagaagaaattctttaagtggatgctctcaaactcagggaaacctaaatctagttatagacaaggcaatcctgagccaagccgaagtagtaattagtaagaccagtggacaatcgacggataacagcatatctag

SEQ ID NO: 597 - RNA, 2733 nt, synthetic construct
  source 1..2733: mol_type = other RNA
gggagaccctcgaccgtcgattgtccactggtcaatggagaaggtgtagagactggaaggcaggtaccctaacagtaaagctgagggtaaagggacagtccagaccacaaactggttaatccaggcagtgaaaactgtagatggtaagcataacccttaaaacagcctgtgggttgcacccacccacagggcccactgggcgctagcactctggtatcacgatacctttgtgcgcctgttttatatccccaccccgagtaaacgttagaagttacgcaaccccgatcaatagtaggtgtagcactccagctgcatcgagatcaagcacttctgtctccccggaccgagtatcaatagactgctaacgcggttgaaggagaaaacgttcgttacccggccaattacttcgagaagcccagtagtgccgtgaaagttgcggagtgtttcgctcagcacttcccccgtgtagatcaggctgatgagtcaccgcgatccccacaggtgactgtggcggtggctgcgttggcggcctgcctatggggcaacccataggacgctctaatacagacatggtgcgaagagcctattgagctaattggtagtcctccggcccctgaatgcggctaatcctaactgcggagcacatgccctcaaaccagggggtggtgtgtcgtaacgggtaactctgcagcggaaccgactactttgggtgtccgtgtttctttttattcttataatggctgcttatggtgacaattaaagaattgttaccatatagctattggattggccatccggtgactaacaaatcgctcatataccagtttgttggttttgttcccttatcacatacagctcataacaccctcttatatttactacaattgaatagcaagaagccaccatggaggacgccaagaacatcaagaagggcccggcgcccttctacccgctggaggacgggaccgccggcgagcagctccacaaggccatgaagcggtacgccctggtgccgggcacgatcgccttcaccgacgcccacatcgaggtcgacatcacctacgcggagtacttcgagatgagcgtgcgcctggccgaggccatgaagcggtacggcctgaacaccaaccaccggatcgtggtgtgctcggagaacagcctgcagttcttcatgccggtgctgggcgccctcttcatcggcgtggccgtcgccccggcgaacgacatctacaacgagcgggagctgctgaacagcatggggatcagccagccgaccgtggtgttcgtgagcaagaagggcctgcagaagatcctgaacgtgcagaagaagctgcccatcatccagaagatcatcatcatggacagcaagaccgactaccagggcttccagtcgatgtacacgttcgtgaccagccacctcccgccgggcttcaacgagtacgacttcgtcccggagagcttcgaccgggacaagaccatcgccctgatcatgaacagcagcggcagcaccggcctgccgaagggggtggccctgccgcaccggaccgcctgcgtgcgcttctcgcacgcccgggaccccatcttcggcaaccagatcatcccggacaccgccatcctgagcgtggtgccgttccaccacggcttcggcatgttcacgaccctgggctacctcatctgcggcttccgggtggtcctgatgtaccggttcgaggaggagctgttcctgcggagcctgcaggactacaagatccagagcgcgctgctcgtgccgaccctgttcagcttcttcgccaagagcaccctgatcgacaagtacgacctgtcgaacctgcacgagatcgccagcgggggcgccccgctgagcaaggaggtgggcgaggccgtggccaagcggttccacctcccgggcatccgccagggctacggcctgaccgagaccacgagcgcgatcctgatcacccccgagggggacgacaagccgggcgccgtgggcaaggtggtcccgttcttcgaggccaaggtggtggacctggacaccggcaagaccctgggcgtgaaccagcggggcgagctgtgcgtgcgggggccgatgatcatgagcggctacgtgaacaacccggaggccaccaacgccctcatcgacaaggacggctggctgcacagcggcgacatcgcctactgggacgaggacgagcacttcttcatcgtcgaccggctgaagtcgctgatcaagtacaagggctaccaggtggcgccggccgagctggagagcatcctgctccagcaccccaacatcttcgacgccggcgtggccgggctgccggacgacgacgccggcgagctgccggccgcggtggtggtgctggagcacggcaagaccatgacggagaaggagatcgtcgactacgtggccagccaggtgaccaccgccaagaagctgcggggcggcgtggtgttcgtggacgaggtcccgaagggcctgaccgggaagctcgacgcccggaagatccgcgagatcctgatcaaggccaagaagggcggcaagatcgccgtgagctgataagggctcaacgagtaagattgactaaacgcttaaaagttattcttactatgggcggtacgtaaagaaacttacgtatgtttacctgtcaaactcggggaagccaatagcgcggtaatcccgaaccaagctccagagaccagtggacaatcgacggataacagcatatctag

SEQ ID NO: 598 - RNA, 2425 nt, synthetic construct
  source 1..2425: mol_type = other RNA
aaaatccgttgattaaaacagcctgtgggttgcacccacccacagggcccactgggcgctagcactctggtatcacgatacctttgtgcgcctgttttatatccccaccccgagtaaacgttagaagttacgcaaccccgatcaatagtaggtgtagcactccagctgcatcgagatcaagcacttctgtctccccggaccgagtatcaatagactgctaacgcggttgaaggagaaaacgttcgttacccggccaattacttcgagaagcccagtagtgccgtgaaagttgcggagtgtttcgctcagcacttcccccgtgtagatcaggctgatgagtcaccgcgatccccacaggtgactgtggcggtggctgcgttggcggcctgcctatggggcaacccataggacgctctaatacagacatggtgcgaagagcctattgagctaattggtagtcctccggcccctgaatgcggctaatcctaactgcggagcacatgccctcaaaccagggggtggtgtgtcgtaacgggtaactctgcagcggaaccgactactttgggtgtccgtgtttctttttattcttataatggctgcttatggtgacaattaaagaattgttaccatatagctattggattggccatccggtgactaacaaatcgctcatataccagtttgttggttttgttcccttatcacatacagctcataacaccctcttatatttactacaattgaatagcaagaaatggaggacgccaagaacatcaagaagggcccggcgcccttctacccgctggaggacgggaccgccggcgagcagctccacaaggccatgaagcggtacgccctggtgccgggcacgatcgccttcaccgacgcccacatcgaggtcgacatcacctacgcggagtacttcgagatgagcgtgcgcctggccgaggccatgaagcggtacggcctgaacaccaaccaccggatcgtggtgtgctcggagaacagcctgcagttcttcatgccggtgctgggcgccctcttcatcggcgtggccgtcgccccggcgaacgacatctacaacgagcgggagctgctgaacagcatggggatcagccagccgaccgtggtgttcgtgagcaagaagggcctgcagaagatcctgaacgtgcagaagaagctgcccatcatccagaagatcatcatcatggacagcaagaccgactaccagggcttccagtcgatgtacacgttcgtgaccagccacctcccgccgggcttcaacgagtacgacttcgtcccggagagcttcgaccgggacaagaccatcgccctgatcatgaacagcagcggcagcaccggcctgccgaagggggtggccctgccgcaccggaccgcctgcgtgcgcttctcgcacgcccgggaccccatcttcggcaaccagatcatcccggacaccgccatcctgagcgtggtgccgttccaccacggcttcggcatgttcacgaccctgggctacctcatctgcggcttccgggtggtcctgatgtaccggttcgaggaggagctgttcctgcggagcctgcaggactacaagatccagagcgcgctgctcgtgccgaccctgttcagcttcttcgccaagagcaccctgatcgacaagtacgacctgtcgaacctgcacgagatcgccagcgggggcgccccgctgagcaaggaggtgggcgaggccgtggccaagcggttccacctcccgggcatccgccagggctacggcctgaccgagaccacgagcgcgatcctgatcacccccgagggggacgacaagccgggcgccgtgggcaaggtggtcccgttcttcgaggccaaggtggtggacctggacaccggcaagaccctgggcgtgaaccagcggggcgagctgtgcgtgcgggggccgatgatcatgagcggctacgtgaacaacccggaggccaccaacgccctcatcgacaaggacggctggctgcacagcggcgacatcgcctactgggacgaggacgagcacttcttcatcgtcgaccggctgaagtcgctgatcaagtacaagggctaccaggtggcgccggccgagctggagagcatcctgctccagcaccccaacatcttcgacgccggcgtggccgggctgccggacgacgacgccggcgagctgccggccgcggtggtggtgctggagcacggcaagaccatgacggagaaggagatcgtcgactacgtggccagccaggtgaccaccgccaagaagctgcggggcggcgtggtgttcgtggacgaggtcccgaagggcctgaccgggaagctcgacgcccggaagatccgcgagatcctgatcaaggccaagaagggcggcaagatcgccgtgagctaaagacgctacggactt

SEQ ID NO: 599 - RNA, 2420 nt, synthetic construct
  source 1..2420: mol_type = other RNA
cataacccttaaaacagcctgtgggttgcacccacccacagggcccactgggcgctagcactctggtatcacgatacctttgtgcgcctgttttatatccccaccccgagtaaacgttagaagttacgcaaccccgatcaatagtaggtgtagcactccagctgcatcgagatcaagcacttctgtctccccggaccgagtatcaatagactgctaacgcggttgaaggagaaaacgttcgttacccggccaattacttcgagaagcccagtagtgccgtgaaagttgcggagtgtttcgctcagcacttcccccgtgtagatcaggctgatgagtcaccgcgatccccacaggtgactgtggcggtggctgcgttggcggcctgcctatggggcaacccataggacgctctaatacagacatggtgcgaagagcctattgagctaattggtagtcctccggcccctgaatgcggctaatcctaactgcggagcacatgccctcaaaccagggggtggtgtgtcgtaacgggtaactctgcagcggaaccgactactttgggtgtccgtgtttctttttattcttataatggctgcttatggtgacaattaaagaattgttaccatatagctattggattggccatccggtgactaacaaatcgctcatataccagtttgttggttttgttcccttatcacatacagctcataacaccctcttatatttactacaattgaatagcaagaagccaccatggaggacgccaagaacatcaagaagggcccggcgcccttctacccgctggaggacgggaccgccggcgagcagctccacaaggccatgaagcggtacgccctggtgccgggcacgatcgccttcaccgacgcccacatcgaggtcgacatcacctacgcggagtacttcgagatgagcgtgcgcctggccgaggccatgaagcggtacggcctgaacaccaaccaccggatcgtggtgtgctcggagaacagcctgcagttcttcatgccggtgctgggcgccctcttcatcggcgtggccgtcgccccggcgaacgacatctacaacgagcgggagctgctgaacagcatggggatcagccagccgaccgtggtgttcgtgagcaagaagggcctgcagaagatcctgaacgtgcagaagaagctgcccatcatccagaagatcatcatcatggacagcaagaccgactaccagggcttccagtcgatgtacacgttcgtgaccagccacctcccgccgggcttcaacgagtacgacttcgtcccggagagcttcgaccgggacaagaccatcgccctgatcatgaacagcagcggcagcaccggcctgccgaagggggtggccctgccgcaccggaccgcctgcgtgcgcttctcgcacgcccgggaccccatcttcggcaaccagatcatcccggacaccgccatcctgagcgtggtgccgttccaccacggcttcggcatgttcacgaccctgggctacctcatctgcggcttccgggtggtcctgatgtaccggttcgaggaggagctgttcctgcggagcctgcaggactacaagatccagagcgcgctgctcgtgccgaccctgttcagcttcttcgccaagagcaccctgatcgacaagtacgacctgtcgaacctgcacgagatcgccagcgggggcgccccgctgagcaaggaggtgggcgaggccgtggccaagcggttccacctcccgggcatccgccagggctacggcctgaccgagaccacgagcgcgatcctgatcacccccgagggggacgacaagccgggcgccgtgggcaaggtggtcccgttcttcgaggccaaggtggtggacctggacaccggcaagaccctgggcgtgaaccagcggggcgagctgtgcgtgcgggggccgatgatcatgagcggctacgtgaacaacccggaggccaccaacgccctcatcgacaaggacggctggctgcacagcggcgacatcgcctactgggacgaggacgagcacttcttcatcgtcgaccggctgaagtcgctgatcaagtacaagggctaccaggtggcgccggccgagctggagagcatcctgctccagcaccccaacatcttcgacgccggcgtggccgggctgccggacgacgacgccggcgagctgccggccgcggtggtggtgctggagcacggcaagaccatgacggagaaggagatcgtcgactacgtggccagccaggtgaccaccgccaagaagctgcggggcggcgtggtgttcgtggacgaggtcccgaagggcctgaccgggaagctcgacgcccggaagatccgcgagatcctgatcaaggccaagaagggcggcaagatcgccgtgagctgataagggct

SEQ ID NO: 600 - RNA, 25 nt, synthetic construct
  source 1..25: mol_type = other RNA
ccgattagttgtaagtcatctattg

SEQ ID NO: 601 - RNA, 27 nt, synthetic construct
  source 1..27: mol_type = other RNA
tcaacggattttaagtccgtagcgtct

SEQ ID NO: 602 - RNA, 10 nt, synthetic construct
  source 1..10: mol_type = other RNA
attttaagtc

SEQ ID NO: 603 - RNA, 20 nt, synthetic construct
  source 1..20: mol_type = other RNA
aacggattttaagtccgtag

SEQ ID NO: 604 - RNA, 23 nt, synthetic construct
  source 1..23: mol_type = other RNA
caacggattttaagtccgtagcg

SEQ ID NO: 605 - RNA, 25 nt, synthetic construct
  source 1..25: mol_type = other RNA
tcaacggattttaagtccgtagcgt

SEQ ID NO: 606 - RNA, 27 nt, synthetic construct
  source 1..27: mol_type = other RNA
tcaacggattttaagtccgtagcgtct

SEQ ID NO: 607 - RNA, 29 nt, synthetic construct
  source 1..29: mol_type = other RNA
atcaacggattttaagtccgtagcgtctt

SEQ ID NO: 608 - RNA, 27 nt, synthetic construct
  source 1..27: mol_type = other RNA
tgcgaggaaccatccggccagctcctg

SEQ ID NO: 609 - RNA, 25 nt, synthetic construct
  source 1..25: mol_type = other RNA
gatagtcgttaggcatttatgtaga

SEQ ID NO: 610 - RNA, 27 nt, synthetic construct
  source 1..27: mol_type = other RNA
tattaaacggtagacccaagaaaacat

SEQ ID NO: 611 - RNA, 2784 nt, synthetic construct
  source 1..2784: mol_type = other RNA
gggagaccctcgaggcccctctgcagtgtctgttgtggaggccagatacgtaactgcttccgcaacaatagatgacttacaactaatcggaaggtgcagagactcgacgggagctaccctaacgtcaagacgagggtaaagagagagtccaattctcaaagccaataggcagtagcgaaagctgcaagagaatgaaaacccccccacccacagcaagaatgccatcatctgtcctcacccccaattttcccttttcttcccctgcaaccattacgcttactcgcatgtgcattgagtggtgcatgtgttgaacaaacagctacactcacatgggggcgggttttcccgccctacggcctctcgcgaggcccaccccttccctccccttataactacagtgctttggtaggtaagcatcctgatcccccgcggaagctgctcacgtggcaactgtggggacccagacaggttatcaaaggcacccggtctttccgccttcaggagtatccctactagtgaattctagcggggctctgcttggtgccaacctcccccaaatgcgcgctgcgggagtgctcttccccaactcaccctagtatcctctcatgtgtgtgcttggtcagcatatctgagacgatgttccgctgtcccagaccagtccagtaatggacgggccagtgcgtgtagtcgtcttccggcttgtccggggcatgtttggtgaaccggtggggtaaggttggtgtgcccaacgcccgtactttggtgacacctcaagaccacccaggaatgccagggaggtaccccacctcacggtgggatctgaccctgggctaattgtctacggtggttcttcttgcttccacttctttcttctgttcacggccaccatggaggacgccaagaacatcaagaagggcccggcgcccttctacccgctggaggacgggaccgccggcgagcagctccacaaggccatgaagcggtacgccctggtgccgggcacgatcgccttcaccgacgcccacatcgaggtcgacatcacctacgcggagtacttcgagatgagcgtgcgcctggccgaggccatgaagcggtacggcctgaacaccaaccaccggatcgtggtgtgctcggagaacagcctgcagttcttcatgccggtgctgggcgccctcttcatcggcgtggccgtcgccccggcgaacgacatctacaacgagcgggagctgctgaacagcatggggatcagccagccgaccgtggtgttcgtgagcaagaagggcctgcagaagatcctgaacgtgcagaagaagctgcccatcatccagaagatcatcatcatggacagcaagaccgactaccagggcttccagtcgatgtacacgttcgtgaccagccacctcccgccgggcttcaacgagtacgacttcgtcccggagagcttcgaccgggacaagaccatcgccctgatcatgaacagcagcggcagcaccggcctgccgaagggggtggccctgccgcaccggaccgcctgcgtgcgcttctcgcacgcccgggaccccatcttcggcaaccagatcatcccggacaccgccatcctgagcgtggtgccgttccaccacggcttcggcatgttcacgaccctgggctacctcatctgcggcttccgggtggtcctgatgtaccggttcgaggaggagctgttcctgcggagcctgcaggactacaagatccagagcgcgctgctcgtgccgaccctgttcagcttcttcgccaagagcaccctgatcgacaagtacgacctgtcgaacctgcacgagatcgccagcgggggcgccccgctgagcaaggaggtgggcgaggccgtggccaagcggttccacctcccgggcatccgccagggctacggcctgaccgagaccacgagcgcgatcctgatcacccccgagggggacgacaagccgggcgccgtgggcaaggtggtcccgttcttcgaggccaaggtggtggacctggacaccggcaagaccctgggcgtgaaccagcggggcgagctgtgcgtgcgggggccgatgatcatgagcggctacgtgaacaacccggaggccaccaacgccctcatcgacaaggacggctggctgcacagcggcgacatcgcctactgggacgaggacgagcacttcttcatcgtcgaccggctgaagtcgctgatcaagtacaagggctaccaggtggcgccggccgagctggagagcatcctgctccagcaccccaacatcttcgacgccggcgtggccgggctgccggacgacgacgccggcgagctgccggccgcggtggtggtgctggagcacggcaagaccatgacggagaaggagatcgtcgactacgtggccagccaggtgaccaccgccaagaagctgcggggcggcgtggtgttcgtggacgaggtcccgaagggcctgaccgggaagctcgacgcccggaagatccgcgagatcctgatcaaggccaagaagggcggcaagatcgccgtgagctgataacgttaaatcacaaacaccattgtcacactccaacttaaatccagacggggggggcttaaataattgagccttaaagaagaaattctttaagtggatgctctcaaactcagggaaacctaaatctagttatagacaaggcaatcctgagccaagccgaagtagtaattagtaagcggaagcagttacgtatctggcctccacaacagacactgcagaggggccataacagcatatctag

SEQ ID NO: 612 - RNA, 2816 nt, synthetic construct
  source 1..2816: mol_type = other RNA
gggagaccctcgaggcccctctgcagtgtctgttgtggaggccagatacgtaactgcttccgcaacaatagatgacttacaactaatcggaaggtgcagagactcgacgggagctaccctaacgtcaagacgagggtaaagagagagtccaattctcaaagccaataggcagtagcgaaagctgcaagagaatgaaaacccccccacccacagcaagaatgccatcatctgtcctcacccccaattttcccttttcttcccctgcaaccattacgcttactcgcatgtgcattgagtggtgcatgtgttgaacaaacagctacactcacatgggggcgggttttcccgccctacggcctctcgcgaggcccaccccttccctccccttataactacagtgctttggtaggtaagcatcctgatcccccgcggaagctgctcacgtggcaactgtggggacccagacaggttatcaaaggcacccggtctttccgccttcaggagtatccctactagtgaattctagcggggctctgcttggtgccaacctcccccaaatgcgcgctgcgggagtgctcttccccaactcaccctagtatcctctcatgtgtgtgcttggtcagcatatctgagacgatgttccgctgtcccagaccagtccagtaatggacgggccagtgcgtgtagtcgtcttccggcttgtccggggcatgtttggtgaaccggtggggtaaggttggtgtgcccaacgcccgtactttggtgacacctcaagaccacccaggaatgccagggaggtaccccacctcacggtgggatctgaccctgggctaattgtctacggtggttcttcttgcttccacttctttcttctgttcacggccaccatggaggacgccaagaacatcaagaagggcccggcgcccttctacccgctggaggacgggaccgccggcgagcagctccacaaggccatgaagcggtacgccctggtgccgggcacgatcgccttcaccgacgcccacatcgaggtcgacatcacctacgcggagtacttcgagatgagcgtgcgcctggccgaggccatgaagcggtacggcctgaacaccaaccaccggatcgtggtgtgctcggagaacagcctgcagttcttcatgccggtgctgggcgccctcttcatcggcgtggccgtcgccccggcgaacgacatctacaacgagcgggagctgctgaacagcatggggatcagccagccgaccgtggtgttcgtgagcaagaagggcctgcagaagatcctgaacgtgcagaagaagctgcccatcatccagaagatcatcatcatggacagcaagaccgactaccagggcttccagtcgatgtacacgttcgtgaccagccacctcccgccgggcttcaacgagtacgacttcgtcccggagagcttcgaccgggacaagaccatcgccctgatcatgaacagcagcggcagcaccggcctgccgaagggggtggccctgccgcaccggaccgcctgcgtgcgcttctcgcacgcccgggaccccatcttcggcaaccagatcatcccggacaccgccatcctgagcgtggtgccgttccaccacggcttcggcatgttcacgaccctgggctacctcatctgcggcttccgggtggtcctgatgtaccggttcgaggaggagctgttcctgcggagcctgcaggactacaagatccagagcgcgctgctcgtgccgaccctgttcagcttcttcgccaagagcaccctgatcgacaagtacgacctgtcgaacctgcacgagatcgccagcgggggcgccccgctgagcaaggaggtgggcgaggccgtggccaagcggttccacctcccgggcatccgccagggctacggcctgaccgagaccacgagcgcgatcctgatcacccccgagggggacgacaagccgggcgccgtgggcaaggtggtcccgttcttcgaggccaaggtggtggacctggacaccggcaagaccctgggcgtgaaccagcggggcgagctgtgcgtgcgggggccgatgatcatgagcggctacgtgaacaacccggaggccaccaacgccctcatcgacaaggacggctggctgcacagcggcgacatcgcctactgggacgaggacgagcacttcttcatcgtcgaccggctgaagtcgctgatcaagtacaagggctaccaggtggcgccggccgagctggagagcatcctgctccagcaccccaacatcttcgacgccggcgtggccgggctgccggacgacgacgccggcgagctgccggccgcggtggtggtgctggagcacggcaagaccatgacggagaaggagatcgtcgactacgtggccagccaggtgaccaccgccaagaagctgcggggcggcgtggtgttcgtggacgaggtcccgaagggcctgaccgggaagctcgacgcccggaagatccgcgagatcctgatcaaggccaagaagggcggcaagatcgccgtgagctgataagattatttcgcaaacaccattgtcacactccaacttaaatcccaaacaccattgtcacactccaacttaaatccagacggggggggcttaaataattgagccttaaagaagaaattctttaagtggatgctctcaaactcagggaaacctaaatctagttatagacaaggcaatcctgagccaagccgaagtagtaattagtaagcggaagcagttacgtatctggcctccacaacagacactgcagaggggccataacagcatatctag

SEQ ID NO: 613 - RNA, 2785 nt, synthetic construct
  source 1..2785: mol_type = other RNA
gggagaccctcgaggcccctctgcagtgtctgttgtggaggccagatacgtaactgcttccgcaacaatagatgacttacaactaatcggaaggtgcagagactcgacgggagctaccctaacgtcaagacgagggtaaagagagagtccaattctcaaagccaataggcagtagcgaaagctgcaagagaatgaaaacccccccacccacagcaagaatgccatcatctgtcctcacccccaattttcccttttcttcccctgcaaccattacgcttactcgcatgtgcattgagtggtgcatgtgttgaacaaacagctacactcacatgggggcgggttttcccgccctacggcctctcgcgaggcccaccccttccctccccttataactacagtgctttggtaggtaagcatcctgatcccccgcggaagctgctcacgtggcaactgtggggacccagacaggttatcaaaggcacccggtctttccgccttcaggagtatccctactagtgaattctagcggggctctgcttggtgccaacctcccccaaatgcgcgctgcgggagtgctcttccccaactcaccctagtatcctctcatgtgtgtgcttggtcagcatatctgagacgatgttccgctgtcccagaccagtccagtaatggacgggccagtgcgtgtagtcgtcttccggcttgtccggggcatgtttggtgaaccggtggggtaaggttggtgtgcccaacgcccgtactttggtgacacctcaagaccacccaggaatgccagggaggtaccccacctcacggtgggatctgaccctgggctaattgtctacggtggttcttcttgcttccacttctttcttctgttcacggccaccatggaggacgccaagaacatcaagaagggcccggcgcccttctacccgctggaggacgggaccgccggcgagcagctccacaaggccatgaagcggtacgccctggtgccgggcacgatcgccttcaccgacgcccacatcgaggtcgacatcacctacgcggagtacttcgagatgagcgtgcgcctggccgaggccatgaagcggtacggcctgaacaccaaccaccggatcgtggtgtgctcggagaacagcctgcagttcttcatgccggtgctgggcgccctcttcatcggcgtggccgtcgccccggcgaacgacatctacaacgagcgggagctgctgaacagcatggggatcagccagccgaccgtggtgttcgtgagcaagaagggcctgcagaagatcctgaacgtgcagaagaagctgcccatcatccagaagatcatcatcatggacagcaagaccgactaccagggcttccagtcgatgtacacgttcgtgaccagccacctcccgccgggcttcaacgagtacgacttcgtcccggagagcttcgaccgggacaagaccatcgccctgatcatgaacagcagcggcagcaccggcctgccgaagggggtggccctgccgcaccggaccgcctgcgtgcgcttctcgcacgcccgggaccccatcttcggcaaccagatcatcccggacaccgccatcctgagcgtggtgccgttccaccacggcttcggcatgttcacgaccctgggctacctcatctgcggcttccgggtggtcctgatgtaccggttcgaggaggagctgttcctgcggagcctgcaggactacaagatccagagcgcgctgctcgtgccgaccctgttcagcttcttcgccaagagcaccctgatcgacaagtacgacctgtcgaacctgcacgagatcgccagcgggggcgccccgctgagcaaggaggtgggcgaggccgtggccaagcggttccacctcccgggcatccgccagggctacggcctgaccgagaccacgagcgcgatcctgatcacccccgagggggacgacaagccgggcgccgtgggcaaggtggtcccgttcttcgaggccaaggtggtggacctggacaccggcaagaccctgggcgtgaaccagcggggcgagctgtgcgtgcgggggccgatgatcatgagcggctacgtgaacaacccggaggccaccaacgccctcatcgacaaggacggctggctgcacagcggcgacatcgcctactgggacgaggacgagcacttcttcatcgtcgaccggctgaagtcgctgatcaagtacaagggctaccaggtggcgccggccgagctggagagcatcctgctccagcaccccaacatcttcgacgccggcgtggccgggctgccggacgacgacgccggcgagctgccggccgcggtggtggtgctggagcacggcaagaccatgacggagaaggagatcgtcgactacgtggccagccaggtgaccaccgccaagaagctgcggggcggcgtggtgttcgtggacgaggtcccgaagggcctgaccgggaagctcgacgcccggaagatccgcgagatcctgatcaaggccaagaagggcggcaagatcgccgtgagctgataacgttaaatcactccagcccctccagggcttcctacttaaatccagacggggggggcttaaataattgagccttaaagaagaaattctttaagtggatgctctcaaactcagggaaacctaaatctagttatagacaaggcaatcctgagccaagccgaagtagtaattagtaagcggaagcagttacgtatctggcctccacaacagacactgcagaggggccataacagcatatctag

SEQ ID NO: 614 - RNA, 2818 nt, synthetic construct
  source 1..2818: mol_type = other RNA
gggagaccctcgaggcccctctgcagtgtctgttgtggaggccagatacgtaactgcttccgcaacaatagatgacttacaactaatcggaaggtgcagagactcgacgggagctaccctaacgtcaagacgagggtaaagagagagtccaattctcaaagccaataggcagtagcgaaagctgcaagagaatgaaaacccccccacccacagcaagaatgccatcatctgtcctcacccccaattttcccttttcttcccctgcaaccattacgcttactcgcatgtgcattgagtggtgcatgtgttgaacaaacagctacactcacatgggggcgggttttcccgccctacggcctctcgcgaggcccaccccttccctccccttataactacagtgctttggtaggtaagcatcctgatcccccgcggaagctgctcacgtggcaactgtggggacccagacaggttatcaaaggcacccggtctttccgccttcaggagtatccctactagtgaattctagcggggctctgcttggtgccaacctcccccaaatgcgcgctgcgggagtgctcttccccaactcaccctagtatcctctcatgtgtgtgcttggtcagcatatctgagacgatgttccgctgtcccagaccagtccagtaatggacgggccagtgcgtgtagtcgtcttccggcttgtccggggcatgtttggtgaaccggtggggtaaggttggtgtgcccaacgcccgtactttggtgacacctcaagaccacccaggaatgccagggaggtaccccacctcacggtgggatctgaccctgggctaattgtctacggtggttcttcttgcttccacttctttcttctgttcacggccaccatggaggacgccaagaacatcaagaagggcccggcgcccttctacccgctggaggacgggaccgccggcgagcagctccacaaggccatgaagcggtacgccctggtgccgggcacgatcgccttcaccgacgcccacatcgaggtcgacatcacctacgcggagtacttcgagatgagcgtgcgcctggccgaggccatgaagcggtacggcctgaacaccaaccaccggatcgtggtgtgctcggagaacagcctgcagttcttcatgccggtgctgggcgccctcttcatcggcgtggccgtcgccccggcgaacgacatctacaacgagcgggagctgctgaacagcatggggatcagccagccgaccgtggtgttcgtgagcaagaagggcctgcagaagatcctgaacgtgcagaagaagctgcccatcatccagaagatcatcatcatggacagcaagaccgactaccagggcttccagtcgatgtacacgttcgtgaccagccacctcccgccgggcttcaacgagtacgacttcgtcccggagagcttcgaccgggacaagaccatcgccctgatcatgaacagcagcggcagcaccggcctgccgaagggggtggccctgccgcaccggaccgcctgcgtgcgcttctcgcacgcccgggaccccatcttcggcaaccagatcatcccggacaccgccatcctgagcgtggtgccgttccaccacggcttcggcatgttcacgaccctgggctacctcatctgcggcttccgggtggtcctgatgtaccggttcgaggaggagctgttcctgcggagcctgcaggactacaagatccagagcgcgctgctcgtgccgaccctgttcagcttcttcgccaagagcaccctgatcgacaagtacgacctgtcgaacctgcacgagatcgccagcgggggcgccccgctgagcaaggaggtgggcgaggccgtggccaagcggttccacctcccgggcatccgccagggctacggcctgaccgagaccacgagcgcgatcctgatcacccccgagggggacgacaagccgggcgccgtgggcaaggtggtcccgttcttcgaggccaaggtggtggacctggacaccggcaagaccctgggcgtgaaccagcggggcgagctgtgcgtgcgggggccgatgatcatgagcggctacgtgaacaacccggaggccaccaacgccctcatcgacaaggacggctggctgcacagcggcgacatcgcctactgggacgaggacgagcacttcttcatcgtcgaccggctgaagtcgctgatcaagtacaagggctaccaggtggcgccggccgagctggagagcatcctgctccagcaccccaacatcttcgacgccggcgtggccgggctgccggacgacgacgccggcgagctgccggccgcggtggtggtgctggagcacggcaagaccatgacggagaaggagatcgtcgactacgtggccagccaggtgaccaccgccaagaagctgcggggcggcgtggtgttcgtggacgaggtcccgaagggcctgaccgggaagctcgacgcccggaagatccgcgagatcctgatcaaggccaagaagggcggcaagatcgccgtgagctgataagattatttcgctccagcccctccagggcttcctacttaaatccctccagcccctccagggcttcctacttaaatccagacggggggggcttaaataattgagccttaaagaagaaattctttaagtggatgctctcaaactcagggaaacctaaatctagttatagacaaggcaatcctgagccaagccgaagtagtaattagtaagcggaagcagttacgtatctggcctccacaacagacactgcagaggggccataacagcatatctag

SEQ ID NO: 615 - RNA, 2413 nt, synthetic construct
  source 1..2413: mol_type = other RNA
gggagaccctcgaccgtcgattgtccactggtcccgtcgattgtccactggtcaacaatagatgacttacaactaatcggaaggtgcagagactcgacgggagctaccctaacgtcaagacgagggtaaagagagagtccaattctcaaagccaataggcagtagcgaaagctgcaagagaatgaaaacccccccacccacagcaagaatgccatcatctgtcctcacccccaattttcccttttcttcccctgcaaccattacgcttactcgcatgtgcattgagtggtgcatgtgttgaacaaacagctacactcacatgggggcgggttttcccgccctacggcctctcgcgaggcccaccccttccctccccttataactacagtgctttggtaggtaagcatcctgatcccccgcggaagctgctcacgtggcaactgtggggacccagacaggttatcaaaggcacccggtctttccgccttcaggagtatccctactagtgaattctagcggggctctgcttggtgccaacctcccccaaatgcgcgctgcgggagtgctcttccccaactcaccctagtatcctctcatgtgtgtgcttggtcagcatatctgagacgatgttccgctgtcccagaccagtccagtaatggacgggccagtgcgtgtagtcgtcttccggcttgtccggggcatgtttggtgaaccggtggggtaaggttggtgtgcccaacgcccgtactttggtgacacctcaagaccacccaggaatgccagggaggtaccccacctcacggtgggatctgaccctgggctaattgtctacggtggttcttcttgcttccacttctttcttctgttcacggccaccatggatatgagagcccatgttcatctgctgggcctgctgctgctttggctgcctggcgctaaatgcaacatcaccaacctgtgtccatttggagaggtgttcaatgccaccaggtttgcctctgtctatgcctggaacaggaagaggattagcaactgtgtggctgactactctgtgctctacaactctgcctccttcagcaccttcaagtgttatggagtgagcccaaccaaactgaatgacctgtgtttcaccaatgtctatgctgactcctttgtgattaggggagatgaggtgagacagattgcccctggacaaacaggcaagattgctgactacaactacaaactgcctgatgacttcacaggctgtgtgattgcctggaacagcaacaacctggacagcaaggtgggaggcaactacaactacctctacagactgttcaggaagagcaacctgaaaccatttgagagggacatcagcacagagatttaccaggctggcagcacaccatgtaatggagtggagggcttcaactgttactttccactccaatcctatggcttccaaccaaccaatggagtgggctaccaaccatacagggtggtggtgctgtcctttgaactgctccatgcccctgccacagtggagcctaagagcagcgacaagacccacacatgccctccatgtcctgctccagaactgctcggaggcccttccgtgttcctgtttcctccaaagcctaaggacaccctgatgatctccagaacacccgaagtgacctgcgtggtggtcgatgtgtctcacgaggaccctgaagtgaagttcaattggtacgtcgacggcgtggaagtgcacaacgccaagaccaagcctagagaggaacagtacaacagcacctacagagtggtgtccgtgctgaccgtgctgcaccaggattggctgaacggcaaagagtacaagtgcaaggtgtccaacaaggccctgccagctcctatcgagaaaaccatcagcaaggccaagggccagcctagggaaccccaggtttacacactgcctccaagccgggaagagatgaccaagaaccaggtgtccctgacctgcctggtcaagggcttctacccttccgatatcgccgtggaatgggagagcaatggccagcctgagaacaactacaagaccacacctcctgtgctggacagcgacggctcattcttcctgtacagcaagctgacagtggacaagagcagatggcagcagggcaacgtgttcagctgcagcgtgatgcacgaggccctgcacaaccactacacccagaagtccctgagcctgtctcctggcaaatgataaagacggggggggcttaaataattgagccttaaagaagaaattctttaagtggatgctctcaaactcagggaaacctaaatctagttatagacaaggcaatcctgagccaagccgaagtagtaattagtaagaccagtggacaatcgacgggaccagtggacaatcgacggataacagcatatctag

SEQ ID NO: 616 - RNA, 2463 nt, synthetic construct
  source 1..2463: mol_type = other RNA
gggagaccctcgaccgtcgattgtccactggtcccgtcgattgtccactggtcaacaatagatgacttacaactaatcggaaggtgcagagactcgacgggagctaccctaacgtcaagacgagggtaaagagagagtccaattctcaaagccaataggcagtagcgaaagctgcaagagaatgaaaacccccccaaaaaaaaaaaaaccaaaaaaaaaaaacaaaaaaaaaaaataattgactaacccacagcaagaatgccatcatctgtcctcacccccaattttcccttttcttcccctgcaaccattacgcttactcgcatgtgcattgagtggtgcatgtgttgaacaaacagctacactcacatgggggcgggttttcccgccctacggcctctcgcgaggcccaccccttccctccccttataactacagtgctttggtaggtaagcatcctgatcccccgcggaagctgctcacgtggcaactgtggggacccagacaggttatcaaaggcacccggtctttccgccttcaggagtatccctactagtgaattctagcggggctctgcttggtgccaacctcccccaaatgcgcgctgcgggagtgctcttccccaactcaccctagtatcctctcatgtgtgtgcttggtcagcatatctgagacgatgttccgctgtcccagaccagtccagtaatggacgggccagtgcgtgtagtcgtcttccggcttgtccggggcatgtttggtgaaccggtggggtaaggttggtgtgcccaacgcccgtactttggtgacacctcaagaccacccaggaatgccagggaggtaccccacctcacggtgggatctgaccctgggctaattgtctacggtggttcttcttgcttccacttctttcttctgttcacggccaccatggatatgagagcccatgttcatctgctgggcctgctgctgctttggctgcctggcgctaaatgcaacatcaccaacctgtgtccatttggagaggtgttcaatgccaccaggtttgcctctgtctatgcctggaacaggaagaggattagcaactgtgtggctgactactctgtgctctacaactctgcctccttcagcaccttcaagtgttatggagtgagcccaaccaaactgaatgacctgtgtttcaccaatgtctatgctgactcctttgtgattaggggagatgaggtgagacagattgcccctggacaaacaggcaagattgctgactacaactacaaactgcctgatgacttcacaggctgtgtgattgcctggaacagcaacaacctggacagcaaggtgggaggcaactacaactacctctacagactgttcaggaagagcaacctgaaaccatttgagagggacatcagcacagagatttaccaggctggcagcacaccatgtaatggagtggagggcttcaactgttactttccactccaatcctatggcttccaaccaaccaatggagtgggctaccaaccatacagggtggtggtgctgtcctttgaactgctccatgcccctgccacagtggagcctaagagcagcgacaagacccacacatgccctccatgtcctgctccagaactgctcggaggcccttccgtgttcctgtttcctccaaagcctaaggacaccctgatgatctccagaacacccgaagtgacctgcgtggtggtcgatgtgtctcacgaggaccctgaagtgaagttcaattggtacgtcgacggcgtggaagtgcacaacgccaagaccaagcctagagaggaacagtacaacagcacctacagagtggtgtccgtgctgaccgtgctgcaccaggattggctgaacggcaaagagtacaagtgcaaggtgtccaacaaggccctgccagctcctatcgagaaaaccatcagcaaggccaagggccagcctagggaaccccaggtttacacactgcctccaagccgggaagagatgaccaagaaccaggtgtccctgacctgcctggtcaagggcttctacccttccgatatcgccgtggaatgggagagcaatggccagcctgagaacaactacaagaccacacctcctgtgctggacagcgacggctcattcttcctgtacagcaagctgacagtggacaagagcagatggcagcagggcaacgtgttcagctgcagcgtgatgcacgaggccctgcacaaccactacacccagaagtccctgagcctgtctcctggcaaatgataaagacggggggggcttaaataattgagccttaaagaagaaattctttaagtggatgctctcaaactcagggaaacctaaatctagttatagacaaggcaatcctgagccaagccgaagtagtaattagtaagaccagtggacaatcgacgggaccagtggacaatcgacggataacagcatatctag

SEQ ID NO: 617 - RNA, 2464 nt, synthetic construct
  source 1..2464: mol_type = other RNA
gggagaccctcgaccgtcgattgtccactggtcccgtcgattgtccactggtcaacaatagatgacttacaactaatcggaaggtgcagagactcgacgggagctaccctaacgtcaagacgagggtaaagagagagtccaattctcaaagccaataggcagtagcgaaagctgcaagagaatgaaaacccccccagggaaataagagagaaaagaagagtaagaagaaatataagaccccggcgcccccacagcaagaatgccatcatctgtcctcacccccaattttcccttttcttcccctgcaaccattacgcttactcgcatgtgcattgagtggtgcatgtgttgaacaaacagctacactcacatgggggcgggttttcccgccctacggcctctcgcgaggcccaccccttccctccccttataactacagtgctttggtaggtaagcatcctgatcccccgcggaagctgctcacgtggcaactgtggggacccagacaggttatcaaaggcacccggtctttccgccttcaggagtatccctactagtgaattctagcggggctctgcttggtgccaacctcccccaaatgcgcgctgcgggagtgctcttccccaactcaccctagtatcctctcatgtgtgtgcttggtcagcatatctgagacgatgttccgctgtcccagaccagtccagtaatggacgggccagtgcgtgtagtcgtcttccggcttgtccggggcatgtttggtgaaccggtggggtaaggttggtgtgcccaacgcccgtactttggtgacacctcaagaccacccaggaatgccagggaggtaccccacctcacggtgggatctgaccctgggctaattgtctacggtggttcttcttgcttccacttctttcttctgttcacggccaccatggatatgagagcccatgttcatctgctgggcctgctgctgctttggctgcctggcgctaaatgcaacatcaccaacctgtgtccatttggagaggtgttcaatgccaccaggtttgcctctgtctatgcctggaacaggaagaggattagcaactgtgtggctgactactctgtgctctacaactctgcctccttcagcaccttcaagtgttatggagtgagcccaaccaaactgaatgacctgtgtttcaccaatgtctatgctgactcctttgtgattaggggagatgaggtgagacagattgcccctggacaaacaggcaagattgctgactacaactacaaactgcctgatgacttcacaggctgtgtgattgcctggaacagcaacaacctggacagcaaggtgggaggcaactacaactacctctacagactgttcaggaagagcaacctgaaaccatttgagagggacatcagcacagagatttaccaggctggcagcacaccatgtaatggagtggagggcttcaactgttactttccactccaatcctatggcttccaaccaaccaatggagtgggctaccaaccatacagggtggtggtgctgtcctttgaactgctccatgcccctgccacagtggagcctaagagcagcgacaagacccacacatgccctccatgtcctgctccagaactgctcggaggcccttccgtgttcctgtttcctccaaagcctaaggacaccctgatgatctccagaacacccgaagtgacctgcgtggtggtcgatgtgtctcacgaggaccctgaagtgaagttcaattggtacgtcgacggcgtggaagtgcacaacgccaagaccaagcctagagaggaacagtacaacagcacctacagagtggtgtccgtgctgaccgtgctgcaccaggattggctgaacggcaaagagtacaagtgcaaggtgtccaacaaggccctgccagctcctatcgagaaaaccatcagcaaggccaagggccagcctagggaaccccaggtttacacactgcctccaagccgggaagagatgaccaagaaccaggtgtccctgacctgcctggtcaagggcttctacccttccgatatcgccgtggaatgggagagcaatggccagcctgagaacaactacaagaccacacctcctgtgctggacagcgacggctcattcttcctgtacagcaagctgacagtggacaagagcagatggcagcagggcaacgtgttcagctgcagcgtgatgcacgaggccctgcacaaccactacacccagaagtccctgagcctgtctcctggcaaatgataaagacggggggggcttaaataattgagccttaaagaagaaattctttaagtggatgctctcaaactcagggaaacctaaatctagttatagacaaggcaatcctgagccaagccgaagtagtaattagtaagaccagtggacaatcgacgggaccagtggacaatcgacggataacagcatatctag

SEQ ID NO: 618 - RNA, 2461 nt, synthetic construct
  source 1..2461: mol_type = other RNA
gggagaccctcgaccgtcgattgtccactggtcccgtcgattgtccactggtcaacaatagatgacttacaactaatcggaaggtgcagagactcgacgggagctaccctaacgtcaagacgagggtaaagagagagtccaattctcaaagccaataggcagtagcgaaagctgcaagagaatgaaaacccccccagagaataaactagtattcttctggtccccacagactcagagagaaccccccacagcaagaatgccatcatctgtcctcacccccaattttcccttttcttcccctgcaaccattacgcttactcgcatgtgcattgagtggtgcatgtgttgaacaaacagctacactcacatgggggcgggttttcccgccctacggcctctcgcgaggcccaccccttccctccccttataactacagtgctttggtaggtaagcatcctgatcccccgcggaagctgctcacgtggcaactgtggggacccagacaggttatcaaaggcacccggtctttccgccttcaggagtatccctactagtgaattctagcggggctctgcttggtgccaacctcccccaaatgcgcgctgcgggagtgctcttccccaactcaccctagtatcctctcatgtgtgtgcttggtcagcatatctgagacgatgttccgctgtcccagaccagtccagtaatggacgggccagtgcgtgtagtcgtcttccggcttgtccggggcatgtttggtgaaccggtggggtaaggttggtgtgcccaacgcccgtactttggtgacacctcaagaccacccaggaatgccagggaggtaccccacctcacggtgggatctgaccctgggctaattgtctacggtggttcttcttgcttccacttctttcttctgttcacggccaccatggatatgagagcccatgttcatctgctgggcctgctgctgctttggctgcctggcgctaaatgcaacatcaccaacctgtgtccatttggagaggtgttcaatgccaccaggtttgcctctgtctatgcctggaacaggaagaggattagcaactgtgtggctgactactctgtgctctacaactctgcctccttcagcaccttcaagtgttatggagtgagcccaaccaaactgaatgacctgtgtttcaccaatgtctatgctgactcctttgtgattaggggagatgaggtgagacagattgcccctggacaaacaggcaagattgctgactacaactacaaactgcctgatgacttcacaggctgtgtgattgcctggaacagcaacaacctggacagcaaggtgggaggcaactacaactacctctacagactgttcaggaagagcaacctgaaaccatttgagagggacatcagcacagagatttaccaggctggcagcacaccatgtaatggagtggagggcttcaactgttactttccactccaatcctatggcttccaaccaaccaatggagtgggctaccaaccatacagggtggtggtgctgtcctttgaactgctccatgcccctgccacagtggagcctaagagcagcgacaagacccacacatgccctccatgtcctgctccagaactgctcggaggcccttccgtgttcctgtttcctccaaagcctaaggacaccctgatgatctccagaacacccgaagtgacctgcgtggtggtcgatgtgtctcacgaggaccctgaagtgaagttcaattggtacgtcgacggcgtggaagtgcacaacgccaagaccaagcctagagaggaacagtacaacagcacctacagagtggtgtccgtgctgaccgtgctgcaccaggattggctgaacggcaaagagtacaagtgcaaggtgtccaacaaggccctgccagctcctatcgagaaaaccatcagcaaggccaagggccagcctagggaaccccaggtttacacactgcctccaagccgggaagagatgaccaagaaccaggtgtccctgacctgcctggtcaagggcttctacccttccgatatcgccgtggaatgggagagcaatggccagcctgagaacaactacaagaccacacctcctgtgctggacagcgacggctcattcttcctgtacagcaagctgacagtggacaagagcagatggcagcagggcaacgtgttcagctgcagcgtgatgcacgaggccctgcacaaccactacacccagaagtccctgagcctgtctcctggcaaatgataaagacggggggggcttaaataattgagccttaaagaagaaattctttaagtggatgctctcaaactcagggaaacctaaatctagttatagacaaggcaatcctgagccaagccgaagtagtaattagtaagaccagtggacaatcgacgggaccagtggacaatcgacggataacagcatatctag

SEQ ID NO: 619 - RNA, 50 nt, synthetic construct
  source 1..50: mol_type = other RNA
aaaaaaaaaaaaccaaaaaaaaaaaacaaaaaaaaaaaataattgactaa

SEQ ID NO: 620 - RNA, 57 nt, synthetic construct
  source 1..57: mol_type = other RNA
gggaaataagagagaaaagaagagtaagaagaaatataagaccccggcgccgccacc

SEQ ID NO: 621 - RNA, 54 nt, synthetic construct
  source 1..54: mol_type = other RNA
gagaataaactagtattcttctggtccccacagactcagagagaacccgccacc

SEQ ID NO: 622 - RNA, 22 nt, synthetic construct
  source 1..22: mol_type = other RNA
caaacaccattgtcacactcca

SEQ ID NO: 623 - RNA, 23 nt, synthetic construct
  source 1..23: mol_type = other RNA
ctccagcccctccagggcttcct

SEQ ID NO: 624 - RNA, 1919 nt, synthetic construct
  source 1..1919: mol_type = other RNA
aaataagagagaaaagaagagtaagaagaaatataagagccaccatggaggacgccaagaacatcaagaagggcccggcgcccttctacccgctggaggacgggaccgccggcgagcagctccacaaggccatgaagcggtacgccctggtgccgggcacgatcgccttcaccgacgcccacatcgaggtcgacatcacctacgcggagtacttcgagatgagcgtgcgcctggccgaggccatgaagcggtacggcctgaacaccaaccaccggatcgtggtgtgctcggagaacagcctgcagttcttcatgccggtgctgggcgccctcttcatcggcgtggccgtcgccccggcgaacgacatctacaacgagcgggagctgctgaacagcatggggatcagccagccgaccgtggtgttcgtgagcaagaagggcctgcagaagatcctgaacgtgcagaagaagctgcccatcatccagaagatcatcatcatggacagcaagaccgactaccagggcttccagtcgatgtacacgttcgtgaccagccacctcccgccgggcttcaacgagtacgacttcgtcccggagagcttcgaccgggacaagaccatcgccctgatcatgaacagcagcggcagcaccggcctgccgaagggggtggccctgccgcaccggaccgcctgcgtgcgcttctcgcacgcccgggaccccatcttcggcaaccagatcatcccggacaccgccatcctgagcgtggtgccgttccaccacggcttcggcatgttcacgaccctgggctacctcatctgcggcttccgggtggtcctgatgtaccggttcgaggaggagctgttcctgcggagcctgcaggactacaagatccagagcgcgctgctcgtgccgaccctgttcagcttcttcgccaagagcaccctgatcgacaagtacgacctgtcgaacctgcacgagatcgccagcgggggcgccccgctgagcaaggaggtgggcgaggccgtggccaagcggttccacctcccgggcatccgccagggctacggcctgaccgagaccacgagcgcgatcctgatcacccccgagggggacgacaagccgggcgccgtgggcaaggtggtcccgttcttcgaggccaaggtggtggacctggacaccggcaagaccctgggcgtgaaccagcggggcgagctgtgcgtgcgggggccgatgatcatgagcggctacgtgaacaacccggaggccaccaacgccctcatcgacaaggacggctggctgcacagcggcgacatcgcctactgggacgaggacgagcacttcttcatcgtcgaccggctgaagtcgctgatcaagtacaagggctaccaggtggcgccggccgagctggagagcatcctgctccagcaccccaacatcttcgacgccggcgtggccgggctgccggacgacgacgccggcgagctgccggccgcggtggtggtgctggagcacggcaagaccatgacggagaaggagatcgtcgactacgtggccagccaggtgaccaccgccaagaagctgcggggcggcgtggtgttcgtggacgaggtcccgaagggcctgaccgggaagctcgacgcccggaagatccgcgagatcctgatcaaggccaagaagggcggcaagatcgccgtgagctaagctgccttctgcggggcttgccttctggccatgcccttcttctctcccttgcacctgtacctcttggtctttgaataaagcctgagtaggaagtatcccaatggcgcgccgagcttggcaaaaaaaaaaaaaaaaaaaaaaaaaaaaaaaaaaaaaaaaaaaaaaaaaaaaaaaaaaaaaaaaaaaaaaaaaaaaaaaaaaaaaaaaaaaaaaaaaaaa